(19) United States
(12) Patent Application Publication
(10) Pub. No.: US 2024/0150471 A1
(43) Pub. Date: May 9, 2024

(54) NATURAL KILLER CELL ANTIBODIES WITH INCREASED ADCC ACTIVITY

(71) Applicant: Xencor, Inc., Pasadena, CA (US)

(72) Inventor: Matthew S. Faber, Glendora, CA (US)

(21) Appl. No.: 18/502,668

(22) Filed: Nov. 6, 2023

Related U.S. Application Data
(60) Provisional application No. 63/382,630, filed on Nov. 7, 2022.
(60) Provisional application No. 63/382,602, filed on Nov. 7, 2022.

(51) Int. Cl. C07K 16/28; C07K 16/30; C07K 16/32

(52) U.S. Cl. CPC C07K 16/2851; C07K 16/28; C07K 16/2803; C07K 16/2818; C07K 16/2827; C07K 16/283; C07K 16/2863; C07K 16/2866; C07K 16/2878; C07K 16/2887; C07K 16/2896; C07K 16/30; C07K 16/3007; C07K 16/32; C07K 2317/31; C07K 2317/52; C07K 2317/732

(57) ABSTRACT

Described herein are antibodies, including multispecific antibodies, that bind to NK cells, optionally a tumor target antigen (TTA) and have increased binding to the CD16A receptor. The antibodies can include an NK cell antigen binding domain (ABD) that binds to the extracellular domain of an NK cell antigen such as NKG2D, NKp30, and NKp46.

### CROSS REFERENCE TO RELATED APPLICATIONS

[0001] This application claims the benefit of U.S. Provisional Patent Application Nos. 63/382,630 and 63/382,602, both filed on Nov. 7, 2022, which are hereby incorporated by reference in their entirety.

### SEQUENCE LISTING

[0002] The instant application contains a Sequence Listing which has been submitted electronically in XML format and is hereby incorporated by reference in its entirety. The XML copy, created on Oct. 24, 2023, is named 51096_4007_WO.xml and is 2,285,568 bytes in size.

### BACKGROUND

[0003] Natural killer cell engagers (NKEs), a new class of immune-oncology therapeutics, contain fragments of antibodies such as antibody binding domains and are designed to exploit the immune functions of NK cells in cancer.

[0004] NK cells are part of the innate immune system and represent 5-20% of circulating lymphocytes in humans. NK cells infiltrate virtually all tissues and were originally characterized by their ability to kill tumor cells effectively without the need for prior sensitization. This ability to infiltrate also occurs in the tumor microenvironment and this infiltration is associated with better overall survival in patients.

[0005] Activated NK cells kill target cells by means similar to cytotoxic T cells, using cytolytic granules as well as through death receptor pathways. When NK cells encounter foreign or cancer cells, they are activated via there activating receptors, including NKG2D, NKp30 and NKp46. Thus, similar to “T Cell Engagers” (TCEs), that bind to CD3 on T Cells and a tumor antigen on a tumor cell to drive cytotoxic killing of the tumor cell, Natural Killer Engagers (NKEs) can be made that bind to the NK cells and a tumor cell and similarly facilitate cytotoxic killing.

[0006] Thus, there remains a need for novel NKEs for the treatment of cancers.

### SUMMARY

[0007] In one aspect, provided herein is an antibody comprising: (a) means for binding the extracellular domain of human NKG2D; and (b) a variant IgG1 Fc dimeric domain comprising an amino acid substitution as compared to human IgG1, wherein the variant that has increased in vitro binding to the human FcγRIIIa receptor as compared to human IgG1.

[0008] In some embodiments, the variant IgG1 Fc domain comprises an amino acid substitution selected from the group including: S239D, S239E, I332D, I332E, S239D/I332E, S239D/I332D, S239E/I332D and S239E/I332E.

[0009] In some embodiments, the variant IgG1 Fc domain comprises an amino acid substitution selected from the group including: S239D, S239E, I332D, I332E, S239D/I332E, S239E/I332E, S239D/I332D, S239E/I332D, S239D/A330L/I332E, S239D/A330L, A330L/I332E, F243L, F243L/R292P/Y300L/V305I/P396L, 332I/P247I/A339Q, S298A/E333A/K334A, V264I/I332E, S298A, S298A/I332E, S298A/E333A/K334A, S239Q/I332E, D265G, Y296Q, S298T, L328I/I332E, V264T, V266I, S239D/I332N, S239E/I332N, S239E/I332Q, S239N/I332E, S239Q/I332D, K326E, A330Y/I332E, V264I/A330Y/I332E, A330L/I332E, V264I/A330L/I332E, L234D, L234E, L234I, L235D, L235T, A330F, L328V/I332E, S239Q/V264I/I332E, S239E/V264I/A330Y/I332E, K274R, N276Y, S324T, K334I, K334F, L234I/L235D, L235D/S239D/A330Y/I332E, S239D/V240I/A330Y/I332E, S239D/V264T/A330Y/I332E, S239D/K326E/A330Y/I332E, S239D/K326T/A330Y/I332E, E293R, S324G, E272R, P227G, G236S, D221K, H224E, K246H, D249Y, R255Y, E258H, T260H, G281D, E283H, E283L, V284E, S239D/E272I/I332E, S239D/E272Y/A330L/I332E, S239D/E272I/A330L/I332E, S239D/K274E/I332E, S239D/K326T/I332E, S239D/K326E/I332E and S239D/K274E/A330L/I332E.

[0010] In some embodiments, the antibody further comprises means for binding a human tumor antigen selected from the group including: EGFR, Trop2, CD20, B7H3, FLT3, DLL3, CD19, CEA, MSLN, BCMA, CAIX, ANO1, CD19, CD123, CD22, CD38, HER2 and CLDN18.2.

[0011] In another aspect, provided herein is an antibody comprising: (a) means for binding the extracellular domain of human NKp46; and (b) a variant IgG1 Fc domain comprising an amino acid substitution as compared to human IgG1, wherein the variant that has increased in vitro binding to the human FcγRIIIa receptor as compared to human IgG1.

[0012] In some embodiments, the variant IgG1 Fc domain comprises an amino acid substitution selected from the group including: S239D, S239E, I332D, I332E, S239D/I332E, S239D/I332D, S239E/I332D and S239E/I332E.

[0013] In some embodiments, the variant IgG1 Fc domain comprises an amino acid substitution selected from the group including: S239D, S239E, I332D, I332E, S239D/I332E, S239E/I332E, S239D/I332D, S239E/I332D, S239D/A330L/I332E, S239D/A330L, A330L/I332E, F243L, F243L/R292P/Y300L/V305I/P396L, 332I/P247I/A339Q, S298A/E333A/K334A, V264I/I332E, S298A, S298A/I332E, S298A/E333A/K334A, S239Q/I332E, D265G, Y296Q, S298T, L328I/I332E, V264T, V266I, S239D/I332N, S239E/I332N, S239E/I332Q, S239N/I332E, S239Q/I332D, K326E, A330Y/I332E, V264I/A330Y/I332E, A330L/I332E, V264I/A330L/I332E, L234D, L234E, L234I, L235D, L235T, A330F, L328V/I332E, S239Q/V264I/I332E, S239E/V264I/A330Y/I332E, K274R, N276Y, S324T, K334I, K334F, L234I/L235D, L235D/S239D/A330Y/I332E, S239D/V240I/A330Y/I332E, S239D/V264T/A330Y/I332E, S239D/K326E/A330Y/I332E, S239D/K326T/A330Y/I332E, E293R, S324G, E272R, P227G, G236S, D221K, H224E, K246H, D249Y, R255Y, E258H, T260H, G281D, E283H, E283L, V284E, S239D/E272I/I332E, S239D/E272Y/A330L/I332E, S239D/E272I/A330L/I332E, S239D/K274E/I332E, S239D/K326T/I332E, S239D/K326E/I332E and S239D/K274E/A330L/I332E.

[0014] In some embodiments, the antibody further comprises means for binding a human tumor antigen selected from the group including: EGFR, Trop2, CD20, B7H3, FLT3, DLL3, CD19, CEA, MSLN, BCMA, CAIX, ANO1, CD19, CD123, CD22, CD38, HER2 and CLDN18.2.

[0015] In a further aspect, provided herein is an antibody comprising: (a) means for binding the extracellular domain of human NKp30; and (b) a variant IgG1 Fc domain comprising an amino acid substitution as compared to human IgG1, wherein the variant that has increased in vitro binding to the human FcγRIIIa receptor as compared to human IgG1.

[0016] In some embodiments, the variant IgG1 Fc domain comprises an amino acid substitution selected from the group including: S239D, S239E, I332D, I332E, S239D/I332E, S239D/I332D, S239E/I332D and S239E/I332E.

[0017] In some embodiments, the variant IgG1 Fc domain comprises an amino acid substitution selected from the group including: S239D, S239E, I332D, I332E, S239D/I332E, S239E/I332E, S239D/I332D, S239E/I332D, S239D/A330L/I332E, S239D/A330L, A330L/I332E, F243L, F243L/R292P/Y300L/V305I/P396L, 332I/P247I/A339Q, S298A/E333A/K334A, V264I/I332E, S298A, S298A/I332E, S298A/E333A/K334A, S239Q/I332E, D265G, Y296Q, S298T, L328I/I332E, V264T, V266I, S239D/I332N, S239E/I332N, S239E/I332Q, S239N/I332E, S239Q/I332D, K326E, A330Y/I332E, V264I/A330Y/I332E, A330L/I332E, V264I/A330L/I332E, L234D, L234E, L234I, L235D, L235T, A330F, L328V/I332E, S239Q/V264I/I332E, S239E/V264I/A330Y/I332E, K274R, N276Y, S324T, K334I, K334F, L234I/L235D, L235D/S239D/A330Y/I332E, S239D/V240I/A330Y/I332E, S239D/V264T/A330Y/I332E, S239D/K326E/A330Y/I332E, S239D/K326T/A330Y/I332E, E293R, S324G, E272R, P227G, G236S, D221K, H224E, K246H, D249Y, R255Y, E258H, T260H, G281D, E283H, E283L, V284E, S239D/E272I/I332E, S239D/E272Y/A330L/I332E, S239D/E272I/A330L/I332E, S239D/K274E/I332E, S239D/K326T/I332E, S239D/K326E/I332E and S239D/K274E/A330L/I332E.

[0018] In some embodiments, the antibody further comprises means for binding a human tumor antigen selected from the group including: EGFR, Trop2, CD20, B7H3, FLT3, DLL3, CD19, CEA, MSLN, BCMA, CAIX, ANO1, CD19, CD123, CD22, CD38, HER2 and CLDN18.2.

[0019] In one aspect, a heterodimeric antibody comprising: (a) means for binding the extracellular domain of human NKG2D; (b) means for binding the extracellular domain of a tumor antigen selected from the group including: EGFR, Trop2, CD20, B7H3, FLT3, DLL3, CD19, CEA, MSLN, BCMA, CAIX, ANO1, CD19, CD22, CD38, CD123, HER2 and CLDN18.2; (c) a variant IgG1 dimeric Fc domain comprising an amino acid substitution as compared to human IgG1 wherein the variant that has increased in vitro binding to the human FcγRIIIa receptor as compared to human IgG1.

[0020] In some embodiments, the variant IgG1 dimeric Fc domain comprises two monomeric Fc domains, wherein one of the monomeric Fc domains comprises an amino acid substitution(s) selected from the group including: S239D, S239E, I332D, I332E, S239D/I332E, S239E/I332E, S239D/I332D, S239E/I332D, S239D/330L/I332E, 239D/330L, 330L/332E, 243L, F243L/R292P/Y300L/V305I/P396L, 332I/247I/339Q, S298A/E333A/K334A, V264I/I332E, S298A, S298A/I332E, S298A/E333A.K334A, S239Q/I332E, D265G, Y296Q, S298T, L328I/I332E, V264T, V266I, S239D/I332N, S239E/I332N, S239E/I332Q, S239N/I332E, S239Q/I332D, K326E, A330Y/I332E, V264I/A330Y/I332E, A330L/I332E, V264I/A330L/I332E, L234D, L234E, L234I, L235D, L235T, A330F, L328V/I332E, S239Q/V264I/I332E, S239E/V264I/A330Y/I332E, K274R, N276Y, S324T, K334I, K334F, L234I/L235D, L235D/S239D/A330Y/I332E, S239D/V240I/A330Y/I332E, S239D/V264T/A330Y/I332E, S239D/K326E/A330Y/I332E, S239D/K326T/A330Y/I332E, 3293R, S324G, E272R, P227G, G236S, D221K, H224E, K246H, D249Y, R255Y, E258H, T260H, G281D, E283H, E283L, V284E, S239D/3272I/I332E, S239D/E272Y/A330L/I332E, S239D/E272I/A330L/I332E, S239D/K274E/I332E, S239D/K326T/I332E, S239D/K326E/I332E AND S239D/K274E/A330L/I332E.

[0021] In some embodiments, both of the monomeric Fc domains comprises the amino acid substitution(s).

[0022] In some embodiments, one of the monomeric Fc domains comprises an S239D amino acid substitution. In various embodiments, one of the monomeric Fc domains comprises an S239E amino acid substitution. In various embodiments, one of the monomeric Fc domains comprises an S239D/I332E amino acid substitution. In many embodiments, one of the monomeric Fc domains comprises an I332E amino acid substitution. In further embodiments, wherein one of the monomeric Fc domains comprises an I332D amino acid substitution.

[0023] In one aspect, a heterodimeric antibody comprising: (a) means for binding the extracellular domain of human NKp46; (b) means for binding the extracellular domain of a tumor antigen selected from the group including: EGFR, Trop2, CD20, B7H3, FLT3, DLL3, CD19, CEA, MSLN, BCMA, CAIX, ANO1, CD19, CD22, CD38, CD123, HER2 and CLDN18.2; (c) a variant IgG1 dimeric Fc domain comprising an amino acid substitution as compared to human IgG1 wherein the variant that has increased in vitro binding to the human FcγRIIIa receptor as compared to human IgG1.

[0024] In some embodiments, the variant IgG1 dimeric Fc domain comprises two monomeric Fe domains, wherein one of the monomeric Fc domains comprises an amino acid substitution(s) selected from the group including: S239D, S239E, I332D, I332E, S239D/I332E, S239E/I332E, S239D/I332D, S239E/I332D, S239D/330L/I332E, 239D/330L, 330L/332E, 243L, F243L/R292P/Y300L/V305I/P396L, 332I/247I/339Q, S298A/E333A/K334A, V264I/I332E, S298A, S298A/I332E, S298A/E333A.K334A, S239Q/I332E, D265G, Y296Q, S298T, L328I/I332E, V264T, V266I, S239D/I332N, S239E/I332N, S239E/I332Q, S239N/I332E, S239Q/I332D, K326E, A330Y/I332E, V264I/A330Y/I332E, A330L/I332E, V264I/A330L/I332E, L234D, L234E, L234I, L235D, L235T, A330F, L328V/I332E, S239Q/V264I/I332E, S239E/V264I/A330Y/I332E, K274R, N276Y, S324T, K334I, K334F, L234I/L235D, L235D/S239D/A330Y/I332E, S239D/V240I/A330Y/I332E, S239D/V264T/A330Y/I332E, S239D/K326E/A330Y/I332E, S239D/K326T/A330Y/I332E, 3293R, S324G, E272R, P227G, G236S, D221K, H224E, K246H, D249Y, R255Y, E258H, T260H, G281D, E283H, E283L, V284E, S239D/3272I/I332E, S239D/E272Y/A330L/I332E, S239D/E272I/A330L/I332E, S239D/K274E/I332E, S239D/K326T/I332E, S239D/K326E/I332E AND S239D/K274E/A330L/I332E.

[0025] In some embodiments, both of the monomeric Fc domains comprises the amino acid substitution(s).

[0026] In some embodiments, the one of the monomeric Fc domains comprises an S239D amino acid substitution. In various embodiments, the one of the monomeric Fc domains comprises an S239E amino acid substitution. In various embodiments, one of the monomeric Fc domains comprises an S239D/I332E amino acid substitution. In many embodiments, one of the monomeric Fc domains comprises an I332E amino acid substitution. In further embodiments, one of the monomeric Fc domains comprises an I332D amino acid substitution.

[0027] In one aspect, a heterodimeric antibody comprising: (a) means for binding the extracellular domain of human NKp30; (b) means for binding the extracellular domain of a tumor antigen selected from the group including: EGFR, Trop2, CD20, B7H3, FLT3, DLL3, CD19, CEA, MSLN, BCMA, CAIX, ANO1, CD19, CD22, CD38, CD123, HER2 and CLDN18.2; (c) a variant IgG1 dimeric Fc domain comprising an amino acid substitution as compared to human IgG1 wherein the variant that has increased in vitro binding to the human FcγRIIIa receptor as compared to human IgG1.

[0028] In some embodiments, the variant IgG1 dimeric Fc domain comprises two monomeric Fe domains, wherein one of the monomeric Fc domains comprises an amino acid substitution(s) selected from the group including: S239D, S239E, I332D, I332E, S239D/I332E, S239E/I332E, S239D/I332D, S239E/I332D, S239D/330L/I332E, 239D/330L, 330L/332E, 243L, F243L/R292P/Y300L/V305I/P396L, 332I/247I/339Q, S298A/E333A/K334A, V264I/I332E, S298A, S298A/I332E, S298A/E333A.K334A, S239Q/I332E, D265G, Y296Q, S298T, L328I/I332E, V264T, V266I, S239D/I332N, S239E/I332N, S239E/I332Q, S239N/I332E, S239Q/I332D, K326E, A330Y/I332E, V264I/A330Y/I332E, A330L/I332E, V264I/A330L/I332E, L234D, L234E, L234I, L235D, L235T, A330F, L328V/I332E, S239Q/V264I/I332E, S239E/V264I/A330Y/I332E, K274R, N276Y, S324T, K334I, K334F, L234I/L235D, L235D/S239D/A330Y/I332E, S239D/V240I/A330Y/I332E, S239D/V264T/A330Y/I332E, S239D/K326E/A330Y/I332E, S239D/K326T/A330Y/I332E, 3293R, S324G, E272R, P227G, G236S, D221K, H224E, K246H, D249Y, R255Y, E258H, T260H, G281D, E283H, E283L, V284E, S239D/3272I/I332E, S239D/E272Y/A330L/I332E, S239D/E272I/A330L/I332E, S239D/K274E/I332E, S239D/K326T/I332E, S239D/K326E/I332E AND S239D/K274E/A330L/I332E.

[0029] In some embodiments, both of the monomeric Fc domains comprises the amino acid substitution(s).

[0030] In some embodiments, the one of the monomeric Fc domains comprises an S239D amino acid substitution. In various embodiments, the one of the monomeric Fc domains comprises an S239E amino acid substitution. In various embodiments, one of the monomeric Fc domains comprises an S239D/I332E amino acid substitution. In many embodiments, one of the monomeric Fc domains comprises an I332E amino acid substitution. In further embodiments, wherein one of the monomeric Fc domains comprises an I332D amino acid substitution.

### BRIEF DESCRIPTION OF THE DRAWINGS

[0031] The novel features of the invention are set forth with particularity in the appended claims. A better understanding of the features and advantages of the present invention will be obtained by reference to the following detailed description that sets forth illustrative embodiments, in which the principles of the invention are utilized, and the accompanying drawings (also “Fig.,” “FIG.,” “Figure,” “Figures,” “Figs.,” and “FIGs.” herein) of which:

[0032] FIGS. 1A-1F depict useful pairs of heterodimerization variant sets (including skew and pI variants). In FIG. 1F, there are variants for which there are no corresponding “monomer 2” variants. Such variants are pI variants that can be used alone on either monomer of a NK cell antigen×TTA bsAb, or included, for example, on the non-scFv side of a format that utilizes an scFv as a component and an appropriate charged scFv linker can be used on the second monomer that utilizes an scFv as a binding domain. Suitable charged linkers are shown in FIG. 5.

[0033] FIG. 2 depicts a list of isosteric variant antibody constant regions and their respective substitutions. pI_(−) indicates lower pI variants, while pI_(+) indicates higher pI variants. These variants can be optionally and independently combined with other variants, including heterodimerization variants, outlined herein.

[0034] FIG. 3 depicts useful ablation variants that ablate FcγR binding (also referred to as “knockouts” or “KO” variants). In some embodiments, such ablation variants are included in the Fc domain of both monomers of the subject antibody described herein. In other embodiments, the ablation variants are only included on only one variant Fc domain.

[0035] FIG. 4 depicts useful ablation variants that enhance FcγR binding (also referred to as ADCC-enhanced variants). In some embodiments, such ADCC-enhanced variants are included in the Fc domain of both monomers of the subject antibody described herein. In other embodiments, the variants are only included on only one variant Fc domain.

[0036] FIG. 5 depicts a number of charged scFv linkers that find use in increasing or decreasing the pI of the subject heterodimeric αNK cell antigen×αTTA bsAbs that utilize one or more scFv as a component, as described herein. The (+H) positive linker finds particular use herein, particularly with anti-NK cell antigen V_{L} and V_{H} sequences shown herein. A single prior art scFv linker with a single charge is referenced as “Whitlow,” from Whitlow et al., Protein Engineering, 6(8):989-995 (1993). It should be noted that this linker was used for reducing aggregation and enhancing proteolytic stability in scFvs. Such charged scFv linkers can be used in any of the subject antibody formats disclosed herein that include scFvs (e.g., 1+1 Fab-scFv-Fc, 2+1 Fab₂-scFv-Fc, 2+1 mAb-scFv, etc.).

[0037] FIG. 6 depicts a number of exemplary domain linkers. In some embodiments, these linkers find use linking a single-chain Fv to an Fc chain. In some embodiments, these linkers may be combined in any orientation. For example, a (G)₄S linker (SEQ ID NO: 94) may be combined with a “lower half hinge” linker at the N-terminus or at the C-terminus.

[0038] FIG. 7 depicts a number of additional exemplary domain linkers, specifically, glycine-serine polymers, including for example (GS)n (SEQ ID NO: 120), (GSGGS)n (SEQ ID NO: 117), (GGGGS)n (SEQ ID NO: 118), and (GGGS)n (SEQ ID NO: 119), where n is an integer of at least one up to 10 (where n is generally about 3 to about 4 for some exemplary embodiments).

[0039] FIGS. 8A-8N depict several formats of the present invention. FIG. 8A depicts the “1+1 Fab-scFv-Fc” format, with a first Fab arm binding a first antigen and a second scFv arm binding second antigen. The 1+1 Fab-scFv-Fc format comprises a first monomer comprising a first heavy chain variable region (VH1) covalently attached to the N-terminus of a first heterodimeric Fc backbone (optionally via a linker), a second monomer comprising a single-chain Fv covalently attached to the N-terminus of a second corresponding heterodimeric Fc backbone (optionally via a linker), and a third monomer comprising a light chain variable region covalently to a light chain constant domain, wherein the light chain variable region is complementary to the VH1. FIG. 8B depicts the “2+1 Fab₂-scFv-Fc” format, with a first Fab arm and a second Fab-scFv arm, wherein the Fab binds a first antigen and the scFv binds second antigen. The 2+1 Fab₂-scFv-Fc format comprises a first monomer comprising a first heavy chain variable region (VH1) covalently attached to the N-terminus of a first heterodimeric Fc backbone (optionally via a linker), a second monomer comprising the VH1 covalently attached (optionally via a linker) to a single-chain Fv covalently attached (optionally via a linker) to the N-terminus of a second corresponding heterodimeric Fc backbone, and a third monomer comprising a light chain variable region covalently to a light chain constant domain, wherein the light chain variable region is complementary to the VH1. FIG. 8C depicts the “1+1 common light chain” (or “1+1 CLC”) format, with a first Fc comprising a first Fab arm binding a first antigen and a second Fc comprising a second Fab arm binding second antigen. The 1+1 CLC format comprises a first monomer comprising VH1-CH1-hinge-CH2-CH3, a second monomer comprising VH2-CH1-hinge-CH2-CH3, and a third monomer comprising V_{L}-C_{L}. The V_{L} pairs with the VH1 to form a binding domain with a first antigen binding specificity; and the V_{L} pairs with the VH2 to form a binding domain with a second antigen binding specificity. FIG. 8D depicts the “2+1 common light chain” (or “2+1 CLC”) format, with a first Fc comprising 2 Fab arms each binding a first antigen and a second Fc comprising 1 Fab arm binding a second antigen. The 2+1 CLC format comprises a first monomer comprising VH1-CH1-hinge-VH1-CH1-hinge-CH2-CH3, a second monomer comprising VH2-CH1-hinge-CH2-CH3, and a third monomer comprising V_{L}—C_{L}. The V_{L} pairs with the first and second VH1 to form binding domains with a first antigen binding specificity; and the V_{L} pairs with the VH2 to form a binding domain with a second antigen binding specificity. FIG. 8E depicts the “2+1 mAb-scFv” (or “mAb-scFv”) format, with a first Fc comprising an N-terminal Fab arm binding a first antigen and a second Fc comprising an N-terminal Fab arm binding the first antigen and a C-terminal scFv binding a second antigen. The 2+1 mAb-scFv format comprises a first monomer comprising VH1-CH1-hinge-CH2-CH3, a second monomer comprising VH1-CH1-hinge-CH2-CH3-scFv, and a third monomer comprising V_{L}—C_{L}. The V_{L} pairs with the first and second VH1 to form binding domains with binding specificity for the first antigen. FIGS. 8F-8N depict several additional formats (e.g., the “dual scFv” format, the “one-armed scFv-mAb” format, the “scFv-mAb” format, the “bispecific mAb” format, the “one-arm central-scFv” format, the “mAb-Fv” format, the “central-Fv” format, the “trident” format, and the “stack Fab₂-scFv-Fc” format, as are described in further detail herein).

[0040] FIG. 9 depicts the sequences for human and cynomolgus NKG2D antigens, including the extracellular domains. Such NKG2D are useful for the development of cross-reactive NKG2D antigen binding domains for ease of clinical development.

[0041] FIGS. 10A-10B depict the sequences for human, mouse, and cynomolgus B7H3, including the extracellular domains. Such B7H3 are useful for the development of cross-reactive B7H3 antigen binding domains for ease of clinical development.

[0042] FIGS. 11A-11C depict anti-human Nkp46 antigen binding domains of use in the present invention.

[0043] FIG. 12 depicts anti-human Nkp30 antigen binding domains of use in the present invention.

[0044] FIGS. 13A-13C depict anti-human EGFR antigen binding domains of use in the present invention.

[0045] FIG. 14 depicts anti-human CD19 antigen binding domains of use in the present invention.

[0046] FIGS. 15A-15C depict anti-human CD20 antigen binding domains of use in the present invention.

[0047] FIG. 16 depicts anti-human CLDN18.2 antigen binding domains of use in the present invention.

[0048] FIGS. 17A-17C depict anti-human BCMA antigen binding domains of use in the present invention.

[0049] FIGS. 18A-18C depict anti-human CEA antigen binding domains of use in the present invention.

[0050] FIG. 19 depicts anti-human FLT3 antigen binding domains of use in the present invention.

[0051] FIGS. 20A-20B depict anti-human HER2 antigen binding domains of use in the present invention.

[0052] FIGS. 21A-21Z and 21AA-21FF depict anti-human MSLN antigen binding domains of use in the present invention.

[0053] FIGS. 22A-22R depict anti-human Trop-2 antigen binding domains of use in the present invention.

[0054] FIG. 23 depicts anti-CAIX and CD123 antigen binding domains of use in the present invention.

[0055] FIGS. 24A-24C depict anti-human DLL3 antigen binding domains of use in the present invention.

[0056] FIGS. 25A-25G depict anti-human PD-1 antigen binding domains of use in the present invention. Note that slashes (“/”) are placed between variable (VH and VL) and constant domains of the ABDs.

[0057] FIGS. 26A-26Z depict variable heavy and variable light domains as well as CDRS for NKG2D binding clones 1D7B4, 1D2B4, mAb-C, and mAb-D, as well as several additional NKG2D variable heavy and variable light chain sequences, and affinity detuned variable heavy domains of the anti-NKG2D 1D7B4 clone and their CDRs (as in Kabat). As noted herein and is true for every sequence herein containing CDRs, the exact identification of the CDR locations may be slightly different depending on the numbering used as is shown in Table 2, and thus included herein are not only the CDRs that are underlined but also CDRs included within the V_{H} and V_{L} domains using other numbering systems. Furthermore, as for all the sequences in the Figures, these V_{H} and V_{L} sequences can be used either in a scFv format or in a Fab format.

[0058] FIG. 27 depicts the variable heavy and variable light chain sequences for 6A1 and 3C4, exemplary humanized rat hybridoma-derived B7H3 binding domains.

[0059] FIG. 28 depicts the variable heavy and variable light chain sequences for 4F12 and 38E2, exemplary humanized rabbit hybridoma-derived B7H3 binding domains.

[0060] FIGS. 29A-29H depict the variable heavy and variable light chain sequences for 2E4A3.189, an exemplary phage-derived B7H3 binding domain, and additional sequences for affinity-optimized variable heavy domains from anti-B7H3 clone 2E4A3.189. It should be noted that the variable heavy domains can be paired with either 2E4A3.189_L1, as depicted in FIG. 29A.

[0061] FIGS. 30A-30R depict the variable heavy and variable light chain sequences for additional B7H3 binding domains which find use in the NK cell antigen×TTA bsAb of the invention. As noted herein and is true for every sequence herein containing CDRs, the exact identification of the CDR locations may be slightly different depending on the numbering used as is shown in Table 2, and thus included herein are not only the CDRs that are underlined but also CDRs included within the V_{H} and V_{L} domains using other numbering systems. Furthermore, as for all the sequences in the Figures, these V_{H} and V_{L} sequences can be used either in a scFv format or in a Fab format.

[0062] FIGS. 31A-31C show the sequences of several useful heterodimeric NK cell antigen×TTA bsAb backbones based on human IgG1 and having WT effector function. Heterodimeric Fc backbone 1 is based on human IgG1 (356E/358M allotype), and includes the L368D/K370S skew variants and the Q295E/N384D/Q418E/N421D pI variants on a first heterodimeric Fc chain, the S364K/E357Q skew variants on a second heterodimeric Fc chain. Heterodimeric Fc backbone 2 is based on human IgG1 (356E/358M allotype), and includes the L368D/K370S skew variants and the Q295E/N384D/Q418E/N421D pI variants on a first heterodimeric Fc chain, the S364K skew variant on a second heterodimeric Fc chain. Heterodimeric Fc backbone 3 is based on human IgG1 (356E/358M allotype), and includes the L368E/K370S skew variants and the Q295E/N384D/Q418E/N421D pI variants on a first heterodimeric Fc chain, the S364K skew variant on a second heterodimeric Fc chain. Heterodimeric Fc backbone 4 is based on human IgG1 (356E/358M allotype), and includes the K360E/Q362E/T411E skew variants and the Q295E/N384D/Q418E/N421D pI variants on a first heterodimeric Fc chain, the D401K skew variant on a second heterodimeric Fc chain. Heterodimeric Fc backbone 5 is based on human IgG1 (356D/358L allotype), and includes the L368D/K370S skew variants and the Q295E/N384D/Q418E/N421D pI variants on a first heterodimeric Fc chain, the S364K/E357Q skew variants on a second heterodimeric Fc chain. Heterodimeric Fc backbone 6 is based on human IgG1 (356E/358M allotype), and includes the L368D/K370S skew variants and the Q295E/N384D/Q418E/N421D pI variants on a first heterodimeric Fc chain, the S364K/E357Q skew variants on a second heterodimeric Fc chain, and N297A variant that removes glycosylation on both chains. Heterodimeric Fc backbone 7 is based on human IgG1 (356E/358M allotype), and includes the L368D/K370S skew variants and the Q295E/N384D/Q418E/N421D pI variants on a first heterodimeric Fc chain, the S364K/E357Q skew variants on a second heterodimeric Fc chain, and N297S variant that removes glycosylation on both chains. Heterodimeric Fc backbone 8 is based on human IgG1 (356E/358M allotype), and includes the L368D/K370S skew variants and the Q295E/N384D/Q418E/N421D pI variants on a first heterodimeric Fc chain, the S364K/E357Q skew variants on a second heterodimeric Fc chain, and M428L/N434S Xtend variants on both chains. Heterodimeric Fc backbone 9 is based on human IgG1 (356D/358L allotype), and includes the L368D/K370S skew variants and the Q295E/N384D/Q418E/N421D pI variants on a first heterodimeric Fc chain, the S364K/E357Q skew variants on a second heterodimeric Fc chain, and the E233P/L234V/L235A/G236del/S267K ablation variants and M428L/N434S Xtend variants on both chains. Heterodimeric Fc backbone 10 is based on human IgG1 (356E/358M allotype), and includes the L368D/K370S skew variants and the Q295E/N384D/Q418E/N421D pI variants on a first heterodimeric Fc chain, the S364K/E357Q skew variants on a second heterodimeric Fc chain, and M428L/N434A Xtend variants on both chains. Heterodimeric Fc backbone 11 is based on human IgG1 (356D/358L allotype), and includes the L368D/K370S skew variants and the Q295E/N384D/Q418E/N421D pI variants on a first heterodimeric Fc chain, the S364K/E357Q skew variants on a second heterodimeric Fc chain, and M428L/N434A Xtend variants on both chains.

[0063] Included within each of these backbones are sequences that are 90, 95, 98 and 99% identical (as defined herein) to the recited sequences, and/or contain from 1, 2, 3, 4, 5, 6, 7, 8, 9 or 10 additional amino acid substitutions (as compared to the “parent” of the Figure, which, as will be appreciated by those in the art, already contain a number of amino acid modifications as compared to the parental human IgG1 (or IgG2 or IgG4, depending on the backbone). That is, the recited backbones may contain additional amino acid modifications (generally amino acid substitutions) in addition or as an alternative to the skew, pI and ablation variants contained within the backbones of this Figure. Additionally, the backbones depicted herein may include deletion of the C-terminal glycine (K446_) and/or lysine (K447_). The C-terminal glycine and/or lysine deletion may be intentionally engineered to reduce heterogeneity or in the context of certain bispecific formats, such as the mAb-scFv format. Additionally, C-terminal glycine and/or lysine deletion may occur naturally for example during production and storage.

[0064] FIGS. 32A-32D show the sequences of several useful heterodimeric NK cell antigen×TTA bsAb backbones based on human IgG1 and having enhanced ADCC function. The sequences here are based on heterodimeric Fc backbone 1 in FIG. 31, although the ADCC variants in FIG. 4 may also be included in any of the other heterodimeric Fc backbones in FIG. 31 ADCC-enhanced Heterodimeric Backbone 1 includes S239D/I332E on both the first and the second heterodimeric Fc chain. ADCC-enhanced Heterodimeric Backbone 2 includes S239D on both the first and the second heterodimeric Fc chain. ADCC-enhanced Heterodimeric Backbone 3 includes I332E on both the first and the second heterodimeric Fc chain. ADCC-enhanced Heterodimeric Backbone 4 includes S239D/I332E on the second heterodimeric Fc chain. ADCC-enhanced Heterodimeric Backbone 5 includes S239D on the second heterodimeric Fc chain. ADCC-enhanced Heterodimeric Backbone 6 includes I332E on the second heterodimeric Fc chain. ADCC-enhanced Heterodimeric Backbone 7 includes S239D/I332E on the first heterodimeric Fc chain. ADCC-enhanced Heterodimeric Backbone 8 includes S239D on the first heterodimeric Fc chain. ADCC-enhanced Heterodimeric Backbone 9 includes I332E on the first heterodimeric Fc chain. ADCC-enhanced Heterodimeric Backbone 10 includes S239D/I332E on the first heterodimeric Fc chain and S239D on the second heterodimeric Fc chain. ADCC-enhanced Heterodimeric Backbone 11 includes S239D/I332E on the first heterodimeric Fc chain and I332E on the second heterodimeric Fc chain. ADCC-enhanced Heterodimeric Backbone 12 includes S239D on the first heterodimeric Fc chain and S239D/I332E on the second heterodimeric Fc chain. ADCC-enhanced Heterodimeric Backbone 13 includes I332E on the first heterodimeric Fc chain and S239D/I332E on the second heterodimeric Fc chain. ADCC-enhanced Heterodimeric Backbone 14 includes S239D on the first heterodimeric Fc chain and I332E on the second heterodimeric Fc chain. ADCC-enhanced Heterodimeric Backbone 15 includes I332E on the first heterodimeric Fc chain and S239D on the second heterodimeric Fc chain.

[0065] Included within each of these backbones are sequences that are 90, 95, 98 and 99% identical (as defined herein) to the recited sequences, and/or contain from 1, 2, 3, 4, 5, 6, 7, 8, 9 or 10 additional amino acid substitutions (as compared to the “parent” of the Figure, which, as will be appreciated by those in the art, already contain a number of amino acid modifications as compared to the parental human IgG1. That is, the recited backbones may contain additional amino acid modifications (generally amino acid substitutions) in addition or as an alternative to the skew, pI and ablation variants contained within the backbones of this Figure. Additionally, the backbones depicted herein may include deletion of the C-terminal glycine (K446_) and/or lysine (K447_). The C-terminal glycine and/or lysine deletion may be intentionally engineered to reduce heterogeneity or in the context of certain bispecific formats, such as the mAb-scFv format. Additionally, C-terminal glycine and/or lysine deletion may occur naturally for example during production and storage.

[0066] FIGS. 33A-33D show the sequences of several useful heterodimeric NK cell antigen×TTA bsAb backbones based on human IgG1 and having enhanced ADCC function and enhanced serum half-life. The sequences here are based on heterodimeric Fc backbone 8 in FIG. 31 although the ADCC variants in FIG. 4 may also be included in any of the other heterodimeric Fc backbones in FIG. 31 ADCC-enhanced Heterodimeric Backbone 1 with Xtend includes S239D/I332E on both the first and the second heterodimeric Fc chain. ADCC-enhanced Heterodimeric Backbone 2 with Xtend includes S239D on both the first and the second heterodimeric Fc chain. ADCC-enhanced Heterodimeric Backbone 3 with Xtend includes I332E on both the first and the second heterodimeric Fc chain. ADCC-enhanced Heterodimeric Backbone 4 with Xtend includes S239D/I332E on the second heterodimeric Fc chain. ADCC-enhanced Heterodimeric Backbone 5 with Xtend includes S239D on the second heterodimeric Fc chain. ADCC-enhanced Heterodimeric Backbone 6 with Xtend includes I332E on the second heterodimeric Fc chain. ADCC-enhanced Heterodimeric Backbone 7 with Xtend includes S239D/I332E on the first heterodimeric Fc chain. ADCC-enhanced Heterodimeric Backbone 8 with Xtend includes S239D on the first heterodimeric Fc chain. ADCC-enhanced Heterodimeric Backbone 9 with Xtend includes I332E on the first heterodimeric Fc chain. ADCC-enhanced Heterodimeric Backbone 10 with Xtend includes S239D/I332E on the first heterodimeric Fc chain and S239D on the second heterodimeric Fc chain. ADCC-enhanced Heterodimeric Backbone 11 with Xtend includes S239D/I332E on the first heterodimeric Fc chain and I332E on the second heterodimeric Fc chain. ADCC-enhanced Heterodimeric Backbone 12 with Xtend includes S239D on the first heterodimeric Fc chain and S239D/I332E on the second heterodimeric Fc chain. ADCC-enhanced Heterodimeric Backbone 13 with Xtend includes I332E on the first heterodimeric Fc chain and S239D/I332E on the second heterodimeric Fc chain. ADCC-enhanced Heterodimeric Backbone 14 with Xtend includes S239D on the first heterodimeric Fc chain and I332E on the second heterodimeric Fc chain. ADCC-enhanced Heterodimeric Backbone 15 with Xtend includes I332E on the first heterodimeric Fc chain and S239D on the second heterodimeric Fc chain.

[0067] Included within each of these backbones are sequences that are 90, 95, 98 and 99% identical (as defined herein) to the recited sequences, and/or contain from 1, 2, 3, 4, 5, 6, 7, 8, 9 or 10 additional amino acid substitutions (as compared to the “parent” of the Figure, which, as will be appreciated by those in the art, already contain a number of amino acid modifications as compared to the parental human IgG1. That is, the recited backbones may contain additional amino acid modifications (generally amino acid substitutions) in addition or as an alternative to the skew, pI and ablation variants contained within the backbones of this Figure. Additionally, the backbones depicted herein may include deletion of the C-terminal glycine (K446_) and/or lysine (K447_). The C-terminal glycine and/or lysine deletion may be intentionally engineered to reduce heterogeneity or in the context of certain bispecific formats, such as the mAb-scFv format. Additionally, C-terminal glycine and/or lysine deletion may occur naturally for example during production and storage.

[0068] FIGS. 34A-34D depict the sequences of heterodimeric antibody format heavy chain backbones with ablated effector function, also referred to as the FcKO variants. Backbone 1 is based on human IgG1 (356E/358M allotype), and includes the S364K/E357Q: L368D/K370S skew variants, C220S on the chain with the S364K/E357Q skew variants, the N208D/Q295E/N384D/Q418E/N421D pI variants on the chain with L368D/K370S skew variants and the E233P/L234V/L235A/G236del/S267K ablation variants on both chains. Backbone 2 is based on human IgG1 (356E/358M allotype), and includes S364K: L368D/K370S skew variants, C220S on the chain with the S364K skew variant, the N208D/Q295E/N384D/Q418E/N421D pI variants on the chain with L368D/K370S skew variants, and the E233P/L234V/L235A/G236del/S267K ablation variants on both chains. Backbone 3 is based on human IgG1 (356E/358M allotype), and includes S364K: L368E/K370S skew variants, C220S on the chain with the S364K skew variant, the N208D/Q295E/N384D/Q418E/N421D pI variants on the chain with L368E/K370S skew variants and the E233P/L234V/L235A/G236del/S267K ablation variants on both chains. Backbone 4 is based on human IgG1 (356E/358M allotype), and includes D401K: K360E/Q362E/T411E skew variants, C220S on the chain with the D401K skew variant, the N208D/Q295E/N384D/Q418E/N421D pI variants on the chain with K360E/Q362E/T411E skew variants and the E233P/L234V/L235A/G236del/S267K ablation variants on both chains. Backbone 5 is based on human IgG1 (356D/358L allotype), and includes S364K/E357Q: L368D/K370S skew variants, C220S on the chain with the S364K/E357Q skew variants, the N208D/Q295E/N384D/Q418E/N421D pI variants on the chain with L368D/K370S skew variants and the E233P/L234V/L235A/G236del/S267K ablation variants on both chains. Backbone 6 is based on human IgG1 (356E/358M allotype), and includes S364K/E357Q: L368D/K370S skew variants, C220S on the chain with the S364K/E357Q skew variants, N208D/Q295E/N384D/Q418E/N421D pI variants on the chain with L368D/K370S skew variants and the E233P/L234V/L235A/G236del/S267K ablation variants on both chains, as well as an N297A variant on both chains. Backbone 7 is identical to 6 except the mutation is N297S. Backbone 8 is based on human IgG4, and includes the S364K/E357Q: L368D/K370S skew variants, the N208D/Q295E/N384D/Q418E/N421D pI variants on the chain with L368D/K370S skew variants, as well as a S228P (EU numbering, this is S241P in Kabat) variant on both chains that ablates Fab arm exchange as is known in the art. Backbone 9 is based on human IgG2, and includes the S364K/E357Q: L368D/K370S skew variants, the N208D/Q295E/N384D/Q418E/N421D pI variants on the chain with L368D/K370S skew variants. Backbone 10 is based on human IgG2, and includes the S364K/E357Q: L368D/K370S skew variants, the N208D/Q295E/N384D/Q418E/N421D pI variants on the chain with L368D/K370S skew variants as well as a S267K variant on both chains. Backbone 11 is identical to backbone 1, except it includes M428L/N434S Xtend mutations. Backbone 12 is based on human IgG1 (356E/358M allotype), and includes S364K/E357Q: L368D/K370S skew variants, C220S and the P217R/P229R/N276K pI variants on the chain with S364K/E357Q skew variants and the E233P/L234V/L235A/G236del/S267K ablation variants on both chains. Included within each of these backbones are sequences that are 90, 95, 98 and 99% identical (as defined herein) to the recited sequences, and/or contain from 1, 2, 3, 4, 5, 6, 7, 8, 9 or 10 additional amino acid substitutions (as compared to the “parent” of the Figure, which, as will be appreciated by those in the art, already contain a number of amino acid modifications as compared to the parental human IgG1 (or IgG2 or IgG4, depending on the backbone). That is, the recited backbones may contain additional amino acid modifications (generally amino acid substitutions) in addition to the skew, pI and ablation variants contained within the backbones of this figure.

[0069] FIGS. 35A-35D show the sequences of multimeric NK cell antigen x TTA bsAb backbones with ablated effector function, also referred to as the FcKO variants. Backbone 1 is based on human IgG1 (356E/358M allotype), and includes the S364K/E357Q: L368D/K370S skew variants, C220S on the chain with the S364K/E357Q skew variants, the N208D/Q295E/N384D/Q418E/N421D pI variants on the chain with L368D/K370S skew variants and the E233P/L234V/L235A/G236del/S267K ablation variants on both chains. Backbone 2 is based on human IgG1 (356E/358M allotype), and includes S364K: L368D/K370S skew variants, C220S on the chain with the S364K skew variant, the N208D/Q295E/N384D/Q418E/N421D pI variants on the chain with L368D/K370S skew variants, and the E233P/L234V/L235A/G236del/S267K ablation variants on both chains. Backbone 3 is based on human IgG1 (356E/358M allotype), and includes S364K: L368E/K370S skew variants, C220S on the chain with the S364K skew variant, the N208D/Q295E/N384D/Q418E/N421D pI variants on the chain with L368E/K370S skew variants and the E233P/L234V/L235A/G236del/S267K ablation variants on both chains. Backbone 4 is based on human IgG1 (356E/358M allotype), and includes D401K: K360E/Q362E/T411E skew variants, C220S on the chain with the D401K skew variant, the N208D/Q295E/N384D/Q418E/N421D pI variants on the chain with K360E/Q362E/T411E skew variants and the E233P/L234V/L235A/G236del/S267K ablation variants on both chains. Backbone 5 is based on human IgG1 (356D/358L allotype), and includes S364K/E357Q: L368D/K370S skew variants, C220S on the chain with the S364K/E357Q skew variants, the N208D/Q295E/N384D/Q418E/N421D pI variants on the chain with L368D/K370S skew variants and the E233P/L234V/L235A/G236del/S267K ablation variants on both chains. Backbone 6 is based on human IgG1 (356E/358M allotype), and includes S364K/E357Q: L368D/K370S skew variants, C220S on the chain with the S364K/E357Q skew variants, N208D/Q295E/N384D/Q418E/N421D pI variants on the chain with L368D/K370S skew variants and the E233P/L234V/L235A/G236del/S267K ablation variants on both chains, as well as an N297A variant on both chains. Backbone 7 is identical to 6 except the mutation is N297S. Backbone 8 is based on human IgG4, and includes the S364K/E357Q: L368D/K370S skew variants, the N208D/Q295E/N384D/Q418E/N421D pI variants on the chain with L368D/K370S skew variants, as well as a S228P (EU numbering, this is S241P in Kabat) variant on both chains that ablates Fab arm exchange as is known in the art. Backbone 9 is based on human IgG2, and includes the S364K/E357Q: L368D/K370S skew variants, the N208D/Q295E/N384D/Q418E/N421D pI variants on the chain with L368D/K370S skew variants. Backbone 10 is based on human IgG2, and includes the S364K/E357Q: L368D/K370S skew variants, the N208D/Q295E/N384D/Q418E/N421D pI variants on the chain with L368D/K370S skew variants as well as a S267K variant on both chains. Backbone 11 is identical to backbone 1, except it includes M428L/N434S Xtend mutations. Backbone 12 is based on human IgG1 (356E/358M allotype), and includes S364K/E357Q: L368D/K370S skew variants, C220S and the P217R/P229R/N276K pI variants on the chain with S364K/E357Q skew variants and the E233P/L234V/L235A/G236del/S267K ablation variants on both chains. Included within each of these backbones are sequences that are 90, 95, 98 and 99% identical (as defined herein) to the recited sequences, and/or contain from 1, 2, 3, 4, 5, 6, 7, 8, 9 or 10 additional amino acid substitutions (as compared to the “parent” of the Figure, which, as will be appreciated by those in the art, already contain a number of amino acid modifications as compared to the parental human IgG1 (or IgG2 or IgG4, depending on the backbone). That is, the recited backbones may contain additional amino acid modifications (generally amino acid substitutions) in addition to the skew, pI and ablation variants contained within the backbones of this figure.

[0070] Included within each of these backbones are sequences that are 90, 95, 98 and 99% identical (as defined herein) to the recited sequences, and/or contain from 1, 2, 3, 4, 5, 6, 7, 8, 9 or 10 additional amino acid substitutions (as compared to the “parent” of the Figure, which, as will be appreciated by those in the art, already contain a number of amino acid modifications as compared to the parental human IgG1 (or IgG2 or IgG4, depending on the backbone). That is, the recited backbones may contain additional amino acid modifications (generally amino acid substitutions) in addition or as an alternative to the skew, pI and ablation variants contained within the backbones of this Figure. Additionally, the backbones depicted herein may include deletion of the C-terminal glycine (K446_) and/or lysine (K447_). The C-terminal glycine and/or lysine deletion may be intentionally engineered to reduce heterogeneity or in the context of certain bispecific formats, such as the mAb-scFv format. Additionally, C-terminal glycine and/or lysine deletion may occur naturally for example during production and storage.

[0071] FIGS. 36A-36C show the sequences of several useful 2+1 Fab₂-scFv-Fc bispecific antibody format heavy chain backbones based on human IgG1, without the Fv sequences (e.g., the scFv and the VH for the Fab side). Backbone 1 is based on human IgG1 (356E/358M allotype), and includes the S364K/E357Q: L368D/K370S skew variants, the N208D/Q295E/N384D/Q418E/N421D pI variants on the chain with L368D/K370S skew variants and the E233P/L234V/L235A/G236del/S267K ablation variants on both chains. Backbone 2 is based on human IgG1 (356E/358M allotype), and includes S364K: L368D/K370S skew variants, the N208D/Q295E/N384D/Q418E/N421D pI variants on the chain with L368D/K370S skew variants, and the E233P/L234V/L235A/G236del/S267K ablation variants on both chains. Backbone 3 is based on human IgG1 (356E/358M allotype), and includes S364K: L368E/K370S skew variants, the N208D/Q295E/N384D/Q418E/N421D pI variants on the chain with L368E/K370S skew variants and the E233P/L234V/L235A/G236del/S267K ablation variants on both chains. Backbone 4 is based on human IgG1 (356E/358M allotype), and includes D401K: K360E/Q362E/T411E skew variants, the N208D/Q295E/N384D/Q418E/N421D pI variants on the chain with K360E/Q362E/T411E skew variants and the E233P/L234V/L235A/G236del/S267K ablation variants on both chains. Backbone 5 is based on human IgG1 (356D/358L allotype), and includes S364K/E357Q: L368D/K370S skew variants, the N208D/Q295E/N384D/Q418E/N421D pI variants on the chain with L368D/K370S skew variants and the E233P/L234V/L235A/G236del/S267K ablation variants on both chains. Backbone 6 is based on human IgG1 (356E/358M allotype), and includes S364K/E357Q: L368D/K370S skew variants, N208D/Q295E/N384D/Q418E/N421D pI variants on the chain with L368D/K370S skew variants and the E233P/L234V/L235A/G236del/S267K ablation variants on both chains, as well as an N297A variant on both chains. Backbone 7 is identical to 6 except the mutation is N297S. Backbone 8 is identical to backbone 1, except it includes M428L/N434S Xtend mutations. Backbone 9 is based on human IgG1 (356E/358M allotype), and includes S364K/E357Q: L368D/K370S skew variants, the P217R/P229R/N276K pI variants on the chain with S364K/E357Q skew variants and the E233P/L234V/L235A/G236del/S267K ablation variants on both chains.

[0072] Included within each of these backbones are sequences that are 90, 95, 98 and 99% identical (as defined herein) to the recited sequences, and/or contain from 1, 2, 3, 4, 5, 6, 7, 8, 9 or 10 additional amino acid substitutions (as compared to the “parent” of the Figure, which, as will be appreciated by those in the art, already contain a number of amino acid modifications as compared to the parental human IgG1 (or IgG2 or IgG4, depending on the backbone). That is, the recited backbones may contain additional amino acid modifications (generally amino acid substitutions) in addition to the skew, pI and ablation variants contained within the backbones of this figure.

[0073] FIG. 37 depicts sequences for “CH1+hinge” that find use in embodiments of NK cell antigen x TTA bsAbs. For particular embodiments wherein the Fab is on the (+) side, the “CH1(+)+hinge” sequences may find use. For particular embodiments wherein the Fab is on the (−) side, the “CH1(−)+hinge” sequences may find use.

[0074] FIG. 38 depicts sequences for “CH1+half hinge” domain linker that find use in embodiments of NK cell antigen x TTA bsAbs in the 2+1 Fab₂-scFv-Fc format. In the 2+1 Fab₂-scFv-Fc format, the “CH1+half hinge” sequences find use linking the variable heavy domain (VH) to the scFv domain on the Fab-scFv-Fc side of the bispecific antibody. It should be noted that other linkers may be used in place of the “CH1+half hinge”. It should also be noted that although the sequences here are based on the IgG1 sequence, equivalents can be constructed based on the IgG2 or IgG4 sequences.

[0075] FIG. 39 depicts sequences for “CH1” that find use in embodiments of FIG. 38 depicts sequences for “CH1” that find use in embodiments of αNKG2D×αB7H3 bsAbs.

[0076] FIG. 40 depicts sequences for “hinge” that find use in embodiments of NK cell antigen×TTA bsAbs.

[0077] FIG. 41 depicts the constant domain of the cognate light chains which find use in the subject NK cell antigen x TTA bsAbs that utilize a Fab binding domain.

[0078] FIG. 42 shows illustrative sequences of heterodimeric NK cell antigen x TTA bsAb backbones for use in the 2+1 mAb-scFv format. The format depicted here is based on heterodimeric Fc backbone 1 as depicted in FIG. 36, except further including G446_on monomer 1 (−) and G446_/K447_on monomer 2 (+). It should be noted that any of the additional backbones depicted in FIG. 36 may be adapted for use in the 2+1 mAb-scFv format with or without including K447_on one or both chains. It should be noted that these sequences may further include the M428L/N434S or M428L/N434A variants.

[0079] FIGS. 43A-43G depict illustrative sequences of heterodimeric NK cell antigen x TTA bsAb backbones for use in the 2+1 mAb-scFv format. The format depicted here is based on heterodimeric Fc backbone 1 as depicted in FIG. 36, except further including K447_on monomer 2 (+). It should be noted that any of the additional backbones depicted in FIGS. 31-33, 35, and 36 may be adapted for use in the 2+1 mAb-scFv format with or without including K447_on one or both chains.

[0080] FIG. 44 depicts a matrix of symmetric and asymmetric ADCC-enhanced Fc variants that have been engineered, as well as the corresponding Tm data, affinity data, production yield, ADCC activity and target cell killing activity. As shown, each Fc monomer (−Fc HC or +Fc-scfv-Fc) has either the S239D and I332E (V90) variants, the S239D variant alone, the I332E variant alone, or is wild-type at the 239 and 332 positions; and each test article has a different combination of these Fc monomers.

[0081] FIG. 45 depicts the range of ADCC activity of the various symmetric and asymmetric V90 variants outlined in FIG. 44. The results show a large range in levels of fold change in ADCC activity of each construct compared to wild type, with V90 having one of the highest fold changes in ADCC activity compared to WT, and the various S239D and I332E combinations showing a broad range of intermediate levels fold changes.

### DETAILED DESCRIPTION

### I. Overview

[0082] The description is presented to enable one of ordinary skill in the art to make and use the invention and is provided in the context of a patent application and its requirements. The section headings used herein are for organization purposes only and are not to be construed as limiting the subject matter described. While various embodiments of the invention(s) of the present disclosure have been shown and described herein, it will be obvious to those skilled in the art that such embodiments are provided by way of example only. Numerous variations, changes, and substitutions may occur to those skilled in the art without departing from the invention(s). It should be understood that various alternatives to the embodiments of the invention(s) described herein may be employed in practicing any one of the inventions(s) set forth herein.

[0083] All patents, published patent applications, other publications, and sequences from GenBank, and other databases referred to herein are incorporated by reference in their entirety with respect to the related technology.

### II. Nomenclature

[0084] The antibodies provided herein are listed in several different formats. In some instances, each monomer of a particular antibody is given a unique “XENP” number, although as will be appreciated in the art, a longer sequence might contain a shorter one.

[0085] In addition, the naming nomenclature of particular antigen binding domains (e.g., NK cell and TTA binding domains) use a “Hx.xx_Ly.yy” or “Hx.xxLy.yy” type of format, with the numbers being unique identifiers to particular variable chain sequences. Thus, the variable domain of the Fab side of B7H3 binding domain 38E2[B7H3] (e.g., FIG. 28) is “H2L1.1”, which indicates that the variable heavy domain, H2, was combined with the light domain L1.1. In the case that these sequences are used as scFvs, the designation “H2_L1.1” or “H2L1.1”, indicates that the variable heavy domain, H2 is combined with the light domain, L1.1, and is in VH-linker-VL orientation, from N- to C-terminus. This molecule with the identical sequences of the heavy and light variable domains but in the reverse order (VL-linker-VH orientation, from N- to C-terminus) would be designated “L1.1_H2”. Similarly, different constructs may “mix and match” the heavy and light chains as will be evident from the sequence listing and the figures.

### III. Definitions

[0086] In order that the application may be more completely understood, several definitions are set forth below. Such definitions are meant to encompass grammatical equivalents.

[0087] By “ablation” herein is meant a decrease or removal of activity. Thus, for example, “ablating FcγR binding” means the Fc region amino acid variant has less than 50% starting binding as compared to an Fc region not containing the specific variant, with more than 70-80-90-95-98% loss of activity being preferred, and in general, with the activity being below the level of detectable binding in a Biacore, SPR or BLI assay.

[0088] By “ADCC” or “antibody dependent cell-mediated cytotoxicity” as used herein is meant the cell-mediated reaction, wherein nonspecific cytotoxic cells that express FcγRs recognize bound antibody on a target cell and subsequently cause lysis of the target cell. ADCC is correlated with binding to FcγRIIIa; increased binding to FcγRIIIa leads to an increase in ADCC activity.

[0089] By “ADCP” or antibody dependent cell-mediated phagocytosis as used herein is meant the cell-mediated reaction wherein nonspecific phagocytic cells that express FcγRs recognize bound antibody on a target cell and subsequently cause phagocytosis of the target cell.

[0090] As used herein, the term “antibody” is used generally. Antibodies provided herein can take on a number of formats as described herein, including traditional antibodies as well as antibody derivatives, fragments, and mimetics, described herein.

[0091] Traditional immunoglobulin (Ig) antibodies are “Y” shaped tetramers. Each tetramer is typically composed of two identical pairs of polypeptide chains, each pair having one “light chain” monomer (typically having a molecular weight of about 25 kDa) and one “heavy chain” monomer (typically having a molecular weight of about 50-70 kDa).

[0092] Other useful antibody formats include, but are not limited to, the “1+1 Fab-scFv-Fc,” “2+1 Fab₂-scFv-Fc,” and “2+1 mAb-scFv” formats provided herein (see, e.g., FIGS. 8A, 8B, and 8E). Additional useful antibody formats include, but are not limited to, “mAb-Fv,” “central-Fv,” “one armed scFv-mAb,” “scFv-mAb,” “dual scFv,” “1+1 CLC,” “2+1 CLC,” “one-armed central scFv,” “2+1 stack Fab₂-scFv-Fc,” “bispecific mAb,” and “trident” format antibodies, as disclosed in US20180127501A1, which is incorporated by reference herein, particularly in pertinent part relating to antibody formats (see, e.g., FIG. 2 of US20180127501A1), and as are shown in FIG. 8.

[0093] Antibody heavy chains typically include a variable heavy (V_{H}) domain, which includes vhCDR1-3, and an Fc domain, which includes a CH2-CH3 monomer. In some embodiments, antibody heavy chains include a hinge and CH1 domain. Traditional antibody heavy chains are monomers that are organized, from N- to C-terminus: V_{H}-CH1-hinge-CH2-CH3. The CH1-hinge-CH2-CH3 is collectively referred to as the heavy chain “constant domain” or “constant region” of the antibody, of which there are five different categories or “isotypes”: IgA, IgD, IgG, IgE and IgM.

[0094] In some embodiments, the antibodies provided herein include IgG isotype constant domains, which has several subclasses, including, but not limited to IgG1, IgG2, and IgG4. In the IgG subclass of immunoglobulins, there are several immunoglobulin domains in the heavy chain. By “immunoglobulin (Ig) domain” herein is meant a region of an immunoglobulin having a distinct tertiary structure. Of interest in the present invention are the heavy chain domains, including, the constant heavy (C_{H}) domains and the hinge domains. In the context of IgG antibodies, the IgG isotypes each have three CH regions. Accordingly, “C_{H}” (or “CH”) domains in the context of IgG are as follows: “CH1” refers to positions 118-215 according to the EU index as in Kabat. “Hinge” refers to positions 216-230 according to the EU index as in Kabat. “CH2” refers to positions 231-340 according to the EU index as in Kabat, and “CH3” refers to positions 341-447 according to the EU index as in Kabat. As shown in Table 1, the exact numbering and placement of the heavy chain domains can be different among different numbering systems. As shown herein and described below, the pI variants can be in one or more of the CH regions, as well as the hinge region, discussed below.

[0095] It should be noted that IgG1 has different allotypes with polymorphisms at 356 (D or E) and 358 (L or M). The sequences depicted herein use the 356E/358M allotype, however the other allotype is included herein. That is, any sequence inclusive of an IgG1 Fc domain included herein can have 356D/358L replacing the 356E/358M allotype. It should be understood that therapeutic antibodies can also comprise hybrids of isotypes and/or subclasses. For example, as shown in US Publication 2009/0163699, incorporated by reference, the present antibodies, in some embodiments, include human IgG1/G2 hybrids.

[0096] By “Fc” or “Fc region” or “Fc domain” as used herein is meant the polypeptide comprising the constant region of an antibody, in some instances, excluding all of the first constant region immunoglobulin domain (e.g., CH1) or a portion thereof, and in some cases, optionally including all or part of the hinge. For IgG, the Fc domain comprises immunoglobulin domains CH2 and CH3 (Cγ2 and Cγ3), and optionally all or a portion of the hinge region between CH1 (Cγ1) and CH2 (Cγ2). Thus, in some cases, the Fc domain includes, from N- to C-terminal, CH2-CH3 and hinge-CH2-CH3. In some embodiments, the Fc domain is that from IgG1, IgG2, or IgG4, with IgG1 hinge-CH2-CH3 and IgG4 hinge-CH2-CH3 finding particular use in many embodiments. Additionally, in the case of human IgG1 Fc domains, the hinge may include a C220S amino acid substitution. Furthermore, in the case of human IgG4 Fc domains, the hinge may include a S228P amino acid substitution. Although the boundaries of the Fc region may vary, the human IgG heavy chain Fc region is usually defined to include residues E216, C226, or A231 to its carboxyl-terminal, wherein the numbering is according to the EU index as in Kabat. In some embodiments, as is more fully described below, amino acid modifications are made to the Fc region, for example to alter binding to one or more FcγR or to the FcRn. As will be appreciated by those in the art, an Fc domain is a self-assembling dimer composed of two Fc regions, Fc monomer 1 and Fc monomer 2. Thus there are monomeric Fc domains (meaning just one monomer) and dimeric Fc domains. As outlined herein, the NK engagers generally rely on dimeric Fc domains that have different amino acid substitutions in each monomer, e.g. they are heterodimeric and not homodimeric.

[0097] By “heavy chain constant region” herein is meant the CH1-hinge-CH2-CH3 portion of an antibody (or fragments thereof), excluding the variable heavy domain; in EU numbering of human IgG1 this is amino acids 118-447. By “heavy chain constant region fragment” herein is meant a heavy chain constant region that contains fewer amino acids from either or both of the N- and C-termini but still retains the ability to form a dimer with another heavy chain constant region.

[0098] Another type of domain of the heavy chain is the hinge region. By “hinge” or “hinge region” or “antibody hinge region” or “hinge domain” herein is meant the flexible polypeptide comprising the amino acids between the first and second constant domains of an antibody. Structurally, the IgG CH1 domain ends at EU position 215, and the IgG CH2 domain begins at residue EU position 231. Thus, for IgG the antibody hinge is herein defined to include positions 216 (E216 in IgG1) to 230 (P230 in IgG1), wherein the numbering is according to the EU index as in Kabat. In some cases, a “hinge fragment” is used, which contains fewer amino acids at either or both of the N- and C-termini of the hinge domain. As noted herein, pI variants can be made in the hinge region as well. Many of the antibodies herein have at least one the cysteines at position 220 according to EU numbering (hinge region) replaced by a serine. Generally, this modification is on the “scFv monomer” side (when 1+1 or 2+1 formats are used) for most of the sequences depicted herein, although it can also be on the “Fab monomer” side, or both, to reduce disulfide formation. Specifically included within the sequences herein are one or both of these cysteines replaced (C220S).

[0099] As will be appreciated by those in the art, the exact numbering and placement of the heavy chain constant region domains (i.e., CH1, hinge, CH2 and CH3 domains) can be different among different numbering systems. A useful comparison of heavy constant region numbering according to EU and Kabat is as below, see Edelman et al., 1969, Proc Natl Acad Sci USA 63:78-85 and Kabat et al., 1991, Sequences of Proteins of Immunological Interest, 5th Ed., United States Public Health Service, National Institutes of Health, Bethesda, entirely incorporated by reference.

TABLE 1

| | EU Numbering | Kabat Numbering |
|---|---|---|
| CH1 | 118-215 | 114-223 |
| Hinge | 216-230 | 226-243 |
| CH2 | 231-340 | 244-360 |
| CH3 | 341-447 | 361-478 |

[0100] The antibody light chain generally comprises two domains: the variable light domain (VL), which includes light chain CDRs vlCDR1-3, and a constant light chain region (often referred to as C_{L} or C_{K}). The antibody light chain is typically organized from N- to C-terminus: VL-CL.

[0101] By “antigen binding domain” or “ABD” herein is meant a set of six Complementary Determining Regions (CDRs) that, when present as part of a polypeptide sequence, specifically binds a target antigen (e.g., B7H3 or MICA/B) as discussed herein. As is known in the art, these CDRs are generally present as a first set of variable heavy CDRs (vhCDRs or VHCDRs) and a second set of variable light CDRs (vlCDRs or VLCDRs), each comprising three CDRs: vhCDR1, vhCDR2, vhCDR3 variable heavy CDRs and vlCDR1, vlCDR2 and vlCDR3 vhCDR3 variable light CDRs. The CDRs are present in the variable heavy domain (vhCDR1-3) and variable light domain (vlCDR1-3). The variable heavy domain and variable light domain from an Fv region.

[0102] The present invention provides a large number of different CDR sets. In this case, a “full CDR set” comprises the three variable light and three variable heavy CDRs, e.g., a vlCDR1, vlCDR2, vlCDR3, vhCDR1, vhCDR2 and vhCDR3. These can be part of a larger variable light or variable heavy domain, respectfully. In addition, as more fully outlined herein, the variable heavy and variable light domains can be on separate polypeptide chains, when a heavy and light chain is used (for example when Fabs are used), or on a single polypeptide chain in the case of scFv sequences.

[0103] As will be appreciated by those in the art, the exact numbering and placement of the CDRs can be different among different numbering systems. However, it should be understood that the disclosure of a variable heavy and/or variable light sequence includes the disclosure of the associated (inherent) CDRs. Accordingly, the disclosure of each variable heavy region is a disclosure of the vhCDRs (e.g., vhCDR1, vhCDR2 and vhCDR3) and the disclosure of each variable light region is a disclosure of the vlCDRs (e.g., vlCDR1, vlCDR2 and vlCDR3). A useful comparison of CDR numbering is as below, see Lafranc et al., Dev. Comp. Immunol. 27(1): 55-77 (2003).

TABLE 2

| | Kabat + | | | | | | |
|---|---|---|---|---|---|---|---|
| | Chothia | IMGT | Kabat | AbM | Chothia | Contact | Xencor |
| vhCDR1 | 26-35 | 27-38 | 31-35 | 26-35 | 23-32 | 30-35 | 27-35 |
| vhCDR2 | 50-65 | 56-65 | 50-65 | 50-58 | 52-56 | 47-58 | 54-61 |
| vhCDR3 | 95-102 | 105-117 | 95-102 | 95-102 | 95-102 | 93-101 | 103-116 |
| vlCDR1 | 24-34 | 27-38 | 24-34 | 24-34 | 24-34 | 30-36 | 27-38 |
| vlCDR2 | 50-56 | 56-65 | 50-56 | 50-56 | 50-56 | 46-55 | 56-62 |
| vlCDR3 | 89-97 | 105-117 | 89-97 | 89-97 | 89-97 | 89-96 | 97-105 |

[0104] Throughout the present specification, the Kabat numbering system is generally used when referring to a residue in the variable domain (approximately, residues 1-107 of the light chain variable region and residues 1-113 of the heavy chain variable region) and the EU numbering system for Fc regions (e.g., Kabat et al., supra (1991)).

[0105] The CDRs contribute to the formation of the antigen-binding, or more specifically, epitope binding site of the antigen binding domains and antibodies. “Epitope” refers to a determinant that interacts with a specific antigen binding site in the variable region of an antibody molecule known as a paratope. Epitopes are groupings of molecules such as amino acids or sugar side chains and usually have specific structural characteristics, as well as specific charge characteristics. A single antigen may have more than one epitope.

[0106] The epitope may comprise amino acid residues directly involved in the binding (also called immunodominant component of the epitope) and other amino acid residues, which are not directly involved in the binding, such as amino acid residues which are effectively blocked by the specifically antigen binding peptide; in other words, the amino acid residue is within the footprint of the specifically antigen binding peptide.

[0107] Epitopes may be either conformational or linear. A conformational epitope is produced by spatially juxtaposed amino acids from different segments of the linear polypeptide chain. A linear epitope is one produced by adjacent amino acid residues in a polypeptide chain. Conformational and non-conformational epitopes may be distinguished in that the binding to the former but not the latter is lost in the presence of denaturing solvents.

[0108] An epitope typically includes at least 3, and more usually, at least 5 or 8-10 amino acids in a unique spatial conformation. Antibodies that recognize the same epitope can be verified in a simple immunoassay showing the ability of one antibody to block the binding of another antibody to a target antigen, for example “binning.” As outlined below, the invention not only includes the enumerated antigen binding domains and antibodies herein, but those that compete for binding with the epitopes bound by the enumerated antigen binding domains.

[0109] In some embodiments, the six CDRs of the antigen binding domain are contributed by a variable heavy and a variable light domain. In a “Fab” format, the set of 6 CDRs are contributed by two different polypeptide sequences, the variable heavy domain (vh or VH or V_{H}; containing the vhCDR1, vhCDR2 and vhCDR3) and the variable light domain (vl or VL or V_{L}; containing the vlCDR1, vlCDR2 and vlCDR3), with the C-terminus of the vh domain being attached to the N-terminus of the CH1 domain of the heavy chain and the C-terminus of the vl domain being attached to the N-terminus of the constant light domain (and thus forming the light chain). In a scFv format, the vh and vl domains are covalently attached, generally through the use of a linker (a “scFv linker”) as outlined herein, into a single polypeptide sequence, which can be either (starting from the N-terminus) vh-linker-vl or vl-linker-vh, with the former being generally preferred (including optional domain linkers on each side, depending on the format used. In general, the C-terminus of the scFv domain is attached to the N-terminus of all or part of the hinge in the second monomer.

[0110] By “variable region” or “variable domain” as used herein is meant the region of an immunoglobulin that comprises one or more Ig domains substantially encoded by any of the V_{κ}, V_{λ}, and/or V_{H} genes that make up the kappa, lambda, and heavy chain immunoglobulin genetic loci respectively, and contains the CDRs that confer antigen specificity. Thus, a “variable heavy domain” pairs with a “variable light domain” to form an antigen binding domain (“ABD”). In addition, each variable domain comprises three hypervariable regions (“complementary determining regions,” “CDRs”) (vhCDR1, vhCDR2 and vhCDR3 for the variable heavy domain and vlCDR1, vlCDR2 and vlCDR3 for the variable light domain) and four framework (FR) regions, arranged from amino-terminus to carboxy-terminus in the following order: FR1-CDR1-FR2-CDR2-FR3-CDR3-FR4.

[0111] By “Fab” or “Fab region” as used herein is meant the antibody region that comprises the V_{H}, CH1, V_{L}, and C_{L} immunoglobulin domains, generally on two different polypeptide chains (e.g., V_{H}-CH1 on one chain and V_{L}—C_{L} on the other). Fab may refer to this region in isolation, or this region in the context of a bispecific antibody of the invention. In the context of a Fab, the Fab comprises an Fv region in addition to the CH1 and C_{L} domains.

[0112] By “Fv” or “Fv fragment” or “Fv region” as used herein is meant the antibody region that comprises the V_{L} and V_{H} domains. Fv regions can be formatted as both Fabs (as discussed above, generally two different polypeptides that also include the constant regions as outlined above) and single chain Fvs (scFvs), where the vl and vh domains are included in a single peptide, attached generally with a linker as discussed herein.

[0113] By “single chain Fv” or “scFv” herein is meant a variable heavy domain covalently attached to a variable light domain, generally using a scFv linker as discussed herein, to form a scFv or scFv domain. A scFv domain can be in either orientation from N- to C-terminus (vh-linker-vl or vl-linker-vh). In the sequences depicted in the sequence listing and in the Figures, the order of the vh and v domain is indicated in the name, e.g., H.X L.Y means N- to C-terminal is vh-linker-vl, and L.Y H.X is vl-linker-vh.

[0114] Some embodiments of the subject antibodies provided herein comprise at least one scFv domain, which, while not naturally occurring, generally includes a variable heavy domain and a variable light domain, linked together by a scFv linker. As outlined herein, while the scFv domain is generally from N- to C-terminus oriented as V_{H}-scFv linker-V_{L}, this can be reversed for any of the scFv domains (or those constructed using vh and vl sequences from Fabs), to V_{L}-scFv linker-V_{H}, with optional linkers at one or both ends depending on the format.

[0115] By “modification” or “variant” herein is meant an amino acid substitution, insertion, and/or deletion in a polypeptide sequence or an alteration to a moiety chemically linked to a protein. For example, a modification may be an altered carbohydrate or PEG structure attached to a protein. By “amino acid modification” herein is meant an amino acid substitution, insertion, and/or deletion in a polypeptide sequence. For clarity, unless otherwise noted, the amino acid modification is always to an amino acid coded for by DNA, e.g., the 20 amino acids that have codons in DNA and RNA.

[0116] By “amino acid substitution” or “substitution” herein is meant the replacement of an amino acid at a particular position in a parent polypeptide sequence with a different amino acid. In particular, in some embodiments, the substitution is to an amino acid that is not naturally occurring at the particular position, either not naturally occurring within the organism or in any organism. For example, the substitution E272Y refers to a variant polypeptide, in this case an Fc variant, in which the glutamic acid at position 272 is replaced with tyrosine. For clarity, a protein which has been engineered to change the nucleic acid coding sequence but not change the starting amino acid (for example exchanging CGG (encoding arginine) to CGA (still encoding arginine) to increase host organism expression levels) is not an “amino acid substitution;” that is, despite the creation of a new gene encoding the same protein, if the protein has the same amino acid at the particular position that it started with, it is not an amino acid substitution.

[0117] By “amino acid insertion” or “insertion” as used herein is meant the addition of an amino acid sequence at a particular position in a parent polypeptide sequence. For example, −233E or 233E designates an insertion of glutamic acid after position 233 and before position 234. Additionally, −233ADE or A233ADE designates an insertion of AlaAspGlu after position 233 and before position 234.

[0118] By “amino acid deletion” or “deletion” as used herein is meant the removal of an amino acid sequence at a particular position in a parent polypeptide sequence. For example, E233− or E233 #, E233( ), E233_, or E233del designates a deletion of glutamic acid at position 233. Additionally, EDA233− or EDA233 #designates a deletion of the sequence GluAspAla that begins at position 233.

[0119] By “variant protein” or “protein variant,” or “variant” as used herein is meant a protein that differs from that of a parent protein by virtue of at least one amino acid modification. The protein variant has at least one amino acid modification compared to the parent protein, yet not so many that the variant protein will not align with the parental protein using an alignment program such as that described below. In general, variant proteins (such as variant Fc domains, etc., outlined herein, are generally at least 75, 80, 85, 90, 91, 92, 93, 94, 95, 96, 97, 98 or 99% identical to the parent protein, using the alignment programs described below, such as BLAST.

[0120] “Variant” as used herein also refers to particular amino acid modifications that confer particular function (e.g., a “heterodimerization variant,” “pI variant,” “ablation variant,” etc.).

[0121] As described below, in some embodiments the parent polypeptide, for example an Fc parent polypeptide, is a human wild-type sequence, such as the heavy constant domain or Fc region from IgG1, IgG2, or IgG4, although human sequences with variants can also serve as “parent polypeptides,” for example the IgG1/2 hybrid of US Publication 2006/0134105 can be included. The protein variant sequence herein will preferably possess at least about 80% identity with a parent protein sequence, and most preferably at least about 90% identity, more preferably at least about 95-98-99% identity. Accordingly, by “antibody variant” or “variant antibody” as used herein is meant an antibody that differs from a parent antibody by virtue of at least one amino acid modification, “IgG variant” or “variant IgG” as used herein is meant an antibody that differs from a parent IgG (again, in many cases, from a human IgG sequence) by virtue of at least one amino acid modification, and “immunoglobulin variant” or “variant immunoglobulin” as used herein is meant an immunoglobulin sequence that differs from that of a parent immunoglobulin sequence by virtue of at least one amino acid modification. “Fc variant” or “variant Fc” as used herein is meant a protein comprising an amino acid modification in an Fc domain as compared to an Fc domain of human IgG1, IgG2 or IgG4.

[0122] “Fc variant” or “variant Fc” as used herein is meant a protein comprising an amino acid modification in an Fc domain. The modification can be an addition, deletion, or substitution. The Fc variants are defined according to the amino acid modifications that compose them. Thus, for example, N434S or 434S is an Fc variant with the substitution for serine at position 434 relative to the parent Fc polypeptide, wherein the numbering is according to the EU index. Likewise, M428L/N434S defines an Fc variant with the substitutions M428L and N434S relative to the parent Fc polypeptide. The identity of the WT amino acid may be unspecified, in which case the aforementioned variant is referred to as 428L/434S. It is noted that the order in which substitutions are provided is arbitrary, that is to say that, for example, 428L/434S is the same Fc variant as 434S/428L, and so on. For all positions discussed herein that relate to antibodies or derivatives and fragments thereof (e.g., Fc domains), unless otherwise noted, amino acid position numbering is according to the EU index. The “EU index” or “EU index as in Kabat” or “EU numbering” scheme refers to the numbering of the EU antibody (Edelman et al., 1969, Proc Natl Acad Sci USA 63:78-85, hereby entirely incorporated by reference). The modification can be an addition, deletion, or substitution.

[0123] In general, variant Fc domains have at least about 80, 85, 90, 95, 96, 97, 98 or 99 percent identity to the corresponding parental human IgG Fc domain (using the identity algorithms discussed below, with one embodiment utilizing the BLAST algorithm as is known in the art, using default parameters). Alternatively, the variant Fc domains can have from 1, 2, 3, 4, 5, 6, 7, 8, 9, 10, 11, 12, 13, 14, 15, 16, 11, 12, 13, 14, 15, 16, 17, 18, 19 or 20 amino acid modifications as compared to the parental Fc domain. Alternatively, the variant Fc domains can have up to 1, 2, 3, 4, 5, 6, 7, 8, 9, 10, 11, 12, 13, 14, 15, 16, 11, 12, 13, 14, 15, 16, 17, 18, 19 or 20 amino acid modifications as compared to the parental Fc domain. Additionally, as discussed herein, the variant Fc domains described herein still retain the ability to form a dimer with another Fc domain as measured using known techniques as described herein, such as non-denaturing gel electrophoresis.

[0124] By “protein” as used herein is meant at least two covalently attached amino acids, which includes proteins, polypeptides, oligopeptides, and peptides. In addition, polypeptides that make up the antibodies of the invention may include synthetic derivatization of one or more side chains or termini, glycosylation, PEGylation, circular permutation, cyclization, linkers to other molecules, fusion to proteins or protein domains, and addition of peptide tags or labels.

[0125] By “residue” as used herein is meant a position in a protein and its associated amino acid identity. For example, Asparagine 297 (also referred to as Asn297 or N297) is a residue at position 297 in the human antibody IgG1.

[0126] By “IgG subclass modification” or “isotype modification” as used herein is meant an amino acid modification that converts one amino acid of one IgG isotype to the corresponding amino acid in a different, aligned IgG isotype. For example, because IgG1 comprises a tyrosine and IgG2 a phenylalanine at EU position 296, a F296Y substitution in IgG2 is considered an IgG subclass modification.

[0127] By “non-naturally occurring modification” as used herein is meant an amino acid modification that is not isotypic. For example, because none of the human IgGs comprise a serine at position 434, the substitution 434S in IgG1, IgG2, or IgG4 (or hybrids thereof) is considered a non-naturally occurring modification.

[0128] By “amino acid” and “amino acid identity” as used herein is meant one of the 20 naturally occurring amino acids that are coded for by DNA and RNA.

[0129] By “effector function” as used herein is meant a biochemical event that results from the interaction of an antibody Fc region with an Fc receptor or ligand. Effector functions include but are not limited to ADCC, ADCP, and CDC.

[0130] By “IgG Fc ligand” as used herein is meant a molecule, preferably a polypeptide, from any organism that binds to the Fc region of an IgG antibody to form an Fc/Fc ligand complex. Fc ligands include but are not limited to FcγRIs, FcγRIIs, FcγRIIIs, FcRn, C1q, C3, mannan binding lectin, mannose receptor, staphylococcal protein A, streptococcal protein G, and viral FcγR. Fc ligands also include Fc receptor homologs (FcRH), which are a family of Fc receptors that are homologous to the FcγRs (Davis et al., 2002, Immunological Reviews 190: 123-136, entirely incorporated by reference). Fc ligands may include undiscovered molecules that bind Fc. Particular IgG Fc ligands are FcRn and Fc gamma receptors. By “Fc ligand” as used herein is meant a molecule, preferably a polypeptide, from any organism that binds to the Fc region of an antibody to form an Fc/Fc ligand complex.

[0131] By “Fc gamma receptor,” “FcγR,” “FcγR,” or “FcgammaR” as used herein is meant any member of the family of proteins that bind the IgG antibody Fc region and is encoded by an FcγR gene. In humans this family includes but is not limited to FcγRI (CD64), including isoforms FcγRIa, FcγRIb, and FcγRIc; FcγRII (CD32), including isoforms FcγRIIa (including allotypes H131 and R131), FcγRIIb (including FcγRIIb-1 and FcγRIIb-2), and FcγRIIc; and FcγRIII (CD16), including isoforms FcγRIIIa (including allotypes V158 and F158) and FcγRIIIb (including allotypes FcγRIIb-NA1 and FcγRIIb-NA2) (Jefferis et al., 2002, Immunol Lett 82:57-65, entirely incorporated by reference), as well as any undiscovered human FcγRs or FcγR isoforms or allotypes. An FcγR may be from any organism, including but not limited to humans, mice, rats, rabbits, and monkeys. Mouse FcγRs include but are not limited to FcγRI (CD64), FcγRII (CD32), FcγRIII (CD16), and FcγRIII-2 (CD16-2), as well as any undiscovered mouse FcγRs or FcγR isoforms or allotypes.

[0132] By “FcγRIIIa” or “CD16A” as used herein is meant a receptor for the Fc region of immunoglobulin IgG. Additional details about human CD16A such as an amino acid sequence, nucleic acid sequence and genomic information can be found in UniProtKB/Swiss-Prot No. P08637, NCBI GenPept Nos. NP_000560.6 and NP_001316049.1, NCBI GenBank No. NM_000569.8, and the like.

[0133] By “FcRn” or “neonatal Fc Receptor” as used herein is meant a protein that binds the IgG antibody Fc region and is encoded at least in part by an FcRn gene. The FcRn may be from any organism, including but not limited to humans, mice, rats, rabbits, and monkeys. As is known in the art, the functional FcRn protein comprises two polypeptides, often referred to as the heavy chain and light chain. The light chain is beta-2-microglobulin and the heavy chain is encoded by the FcRn gene. Unless otherwise noted herein, FcRn or an FcRn protein refers to the complex of FcRn heavy chain with beta-2-microglobulin. A variety of FcRn variants used to increase binding to the FcRn receptor, and in some cases, to increase serum half-life. An “FcRn variant” is an amino acid modification that contributes to increased binding to the FcRn receptor, and suitable FcRn variants are shown below.

[0134] By “parent polypeptide” as used herein is meant a starting polypeptide that is subsequently modified to generate a variant. The parent polypeptide may be a naturally occurring polypeptide, or a variant or engineered version of a naturally occurring polypeptide.

[0135] Accordingly, by “parent immunoglobulin” as used herein is meant an unmodified immunoglobulin polypeptide that is modified to generate a variant, and by “parent antibody” as used herein is meant an unmodified antibody that is modified to generate a variant antibody. It should be noted that “parent antibody” includes known commercial, recombinantly produced antibodies as outlined below. In this context, a “parent Fc domain” will be relative to the recited variant; thus, a “variant human IgG1 Fc domain” is compared to the parent Fc domain of human IgG1, a “variant human IgG4 Fc domain” is compared to the parent Fc domain human IgG4, etc.

[0136] By “position” as used herein is meant a location in the sequence of a protein. Positions may be numbered sequentially, or according to an established format, for example the EU index for numbering of antibody domains (e.g., a CH1, CH2, CH3 or hinge domain).

[0137] By “target antigen” as used herein is meant the molecule that is bound specifically by the antigen binding domain comprising the variable regions of a given antibody.

[0138] By “strandedness” in the context of the monomers of the heterodimeric antibodies of the invention herein is meant that, similar to the two strands of DNA that “match,” heterodimerization variants are incorporated into each monomer so as to preserve the ability to “match” to form heterodimers. For example, if some pI variants are engineered into monomer A (e.g., making the pI higher) then steric variants that are “charge pairs” that can be utilized as well do not interfere with the pI variants, e.g., the charge variants that make a pI higher are put on the same “strand” or “monomer” to preserve both functionalities. Similarly, for “skew” variants that come in pairs of a set as more fully outlined below, the skilled artisan will consider pI in deciding into which strand or monomer one set of the pair will go, such that pI separation is maximized using the pI of the skews as well.

[0139] By “target cell” as used herein is meant a cell that expresses a target antigen.

[0140] By “host cell” in the context of producing a bispecific antibody according to the invention herein is meant a cell that contains the exogeneous nucleic acids encoding the components of the bispecific antibody and is capable of expressing the bispecific antibody under suitable conditions. Suitable host cells are discussed below.

[0141] By “wild-type” or “WT” herein is meant an amino acid sequence or a nucleotide sequence that is found in nature, including allelic variations. A WT protein has an amino acid sequence or a nucleotide sequence that has not been intentionally modified.

[0142] Provided herein are a number of antibody domains (e.g., Fc domains) that have sequence identity to human antibody domains. Sequence identity between two similar sequences (e.g., antibody variable domains) can be measured by algorithms such as that of Smith, T. F. & Waterman, M.S. (1981) “Comparison Of Biosequences,” Adv. Appl. Math. 2:482 [local homology algorithm]; Needleman, S. B. & Wunsch, CD. (1970) “A General Method Applicable To The Search For Similarities In The Amino Acid Sequence Of Two Proteins,” J. Mol. Biol. 48:443 [homology alignment algorithm], Pearson, W.R. & Lipman, D. J. (1988) “Improved Tools For Biological Sequence Comparison,” Proc. Natl. Acad. Sci. (U.S.A.) 85:2444 [search for similarity method]; or Altschul, S. F. et al, (1990) “Basic Local Alignment Search Tool,” J. Mol. Biol. 215:403-10, the “BLAST” algorithm, see https://blast.ncbi.nlm.nih.gov/Blast.cgi. When using any of the aforementioned algorithms, the default parameters (for Window length, gap penalty, etc.) are used. In one embodiment, sequence identity is done using the BLAST algorithm, using default parameters.

[0143] The antibodies of the present invention are generally isolated or recombinant. “Isolated,” when used to describe the various polypeptides disclosed herein, means a polypeptide that has been identified and separated and/or recovered from a cell or cell culture from which it was expressed. Ordinarily, an isolated polypeptide will be prepared by at least one purification step. An “isolated antibody,” refers to an antibody which is substantially free of other antibodies having different antigenic specificities. “Recombinant” means the antibodies are generated using recombinant nucleic acid techniques in exogeneous host cells, and they can be isolated as well.

[0144] “Specific binding” or “specifically binds to” or is “specific for” a particular antigen or an epitope means binding that is measurably different from a non-specific interaction. Specific binding can be measured, for example, by determining binding of a molecule compared to binding of a control molecule, which generally is a molecule of similar structure that does not have binding activity. For example, specific binding can be determined by competition with a control molecule that is similar to the target.

[0145] Specific binding for a particular antigen or an epitope can be exhibited, for example, by an antibody having a K_{D} for an antigen or epitope of at least about 10⁻⁴ M, at least about 10⁻⁵ M, at least about 10⁻⁶ M, at least about 10⁻⁷ M, at least about 10⁻⁸ M, at least about 10⁻⁹ M, alternatively at least about 10⁻¹⁰ M, at least about 10⁻¹¹ M, at least about 10⁻² M, or greater, where K_{D} refers to a dissociation rate of a particular antibody-antigen interaction. Typically, an antibody that specifically binds an antigen will have a K_{D} that is 20-, 50-, 100-, 500-, 1000-, 5,000-, 10,000- or more times greater for a control molecule relative to the antigen or epitope.

[0146] Also, specific binding for a particular antigen or an epitope can be exhibited, for example, by an antibody having a K_{A} or Kₐ for an antigen or epitope of at least 20-, 50-, 100-, 500-, 1000-, 5,000-, 10,000- or more times greater for the epitope relative to a control, where K_{A} or Kₐ refers to an association rate of a particular antibody-antigen interaction. Binding affinity is generally measured using a Biacore, SPR or BLI assay.

[0147] As used herein, the singular forms “a,” “an,” and “the” include plural referents unless the context clearly dictates otherwise. Thus, for example, reference to “an antigen” includes mixtures of antigens; reference to “a pharmaceutically acceptable carrier” includes mixtures of two or more such carriers, and the like. As such, the terms “a” (or “an”), “one or more,” and “at least one” can be used interchangeably herein.

[0148] Furthermore, “and/or” where used herein is to be taken as specific disclosure of each of the two specified features or components with or without the other. Thus, the term “and/or” as used in a phrase such as “A and/or B” herein is intended to include “A and B,” “A or B,” “A (alone),” and “B (alone)”.

[0149] As used herein, the term “about” a value (or parameter) refers to, for example, ±1%, ±2%, ±3%, ±4%, ±5%, 6%, ±7%, ±8%, ±9%, ±10% and the like of a stated value. When referring to a range of values (or parameters), the term “about” refers to +10% of the upper limit and −10% of the lower limit of a stated range of values. When a range of values is provided, it is to be understood that each intervening value between the upper and lower limit of that range, and any other stated or intervening value in that stated range, is encompassed within the scope of the present disclosure. Where the stated range includes upper and/or lower limits, ranges excluding either of those included limits are also included in the present disclosure.

### IV. Introduction

[0150] The present invention provides natural killer cell engagers (NKEs), a growing class of immune-oncology biological medicines.

[0151] One aspect of the mechanism of NKEs is the ability to bind to the human receptor CD16A, also referred to as FcγRIIIa. The engagement of CD16A is, by itself, sufficient to produce cytokines and trigger cytotoxic activity on NK cells. Thus, while many TCE multispecific antibodies utilize variant Fc domains that ablate FcγR receptor binding to minimize off target interactions, NKEs require binding to CD16A. In some cases, NKEs do this by utilizing a separate CD16A antigen binding domain (see, for example, WO2022/074206). In others, such as those described herein, the NKE constructs utilize human IgG1 Fc domain amino acid sequences that retain the ability to bind CD16A by utilizing Fc domains derived from human IgG1 Fc domains. In the present invention, additional amino acid substitutions in the Fc domains of the NKE antibodies are utilized to increase the binding of the NKE to CD16A. Alternatively, it is also possible to produce the NKE antibodies in cell lines that lead to less fucosylation of the antibody that is produced, which leads to increased ADCC.

[0152] Accordingly, the present invention provides antibodies, including multispecific antibodies, that bind to NK cells, optionally a tumor target antigen (TTA) and have increased binding to the CD16A receptor. That is, the antibodies of the invention comprise one or two NK cell antigen binding domains (ABDs), an Fc domain that has increased binding to CD16A as compared to a human IgG1 Fc domain, and one or two ABDs to a TTA. These are generally described as heterodimeric bispecific antibodies, where the Fc regions of each heavy chain are different, generally including amino acid substitutions that allow for heterodimeric Fc domain formation, increased binding to CD16A and other functionalities. As is more fully described below, the amino acid substitutions that allow for increased binding to CD16A can be incorporated into either or both of the monomeric Fc domains. Additionally, as is more fully discussed below, the multispecific antibodies of the invention can have a variety of different formats, with some formats having one or two identical binding domains.

### V. Antigen Binding Domains

[0153] A. Antigen Binding Domains that Bind Human NK Cells

[0154] The present invention provides antibodies, including multispecific antibodies, with antigen binding domains (ABDs) that bind to the extracellular domain (ECD) of human NK cell surface receptors, including, but not limited to, human NKG2D, human NKp46, and human NKp30. Binding affinities of a specific NK cell ABD can be evaluated using an assay recognized by those skilled in the art including, but not limited to, a Surface Plasmon Resonance (SPR) and/or a BLI binding assay (such as Biacore, Octet, or Caterra LSA).

[0155] 1. NKG2D Antigen Binding Domains

[0156] In some embodiments, the NKEs include an ABD that binds to the ECD of human NKG2D. Suitable variable heavy VH and variable light VL domains that bind to the ECD of human NKG2D include, but are not limited to, VH/VL pairs selected from the group including: (i) SEQ ID NOs: 911 and 915, (ii) SEQ ID NOs: 919 and 923, (iii) SEQ ID NOs: 927 and 931, (iv) SEQ ID NOs: 935 and 939, (v) SEQ ID NOs: 943 and 944, (vi) SEQ ID NOs: 945 and 946, (vii) SEQ ID NOs: 947 and 948, (viii) SEQ ID NOs: 949 and 950, (ix) SEQ ID NOs: 951 and 952, (x) SEQ ID NOs: 953 and 954, (xi) SEQ ID NOs: 955 and 956, (xii) SEQ ID NOs: 957 and 958, (xiii) SEQ ID NOs: 959 and 960, (xiv) SEQ ID NOs: 961 and 962, (xv) SEQ ID NOs: 963 and 964, (xvi) SEQ ID NOs: 965 and 966, (xvii) SEQ ID NOs: 967 and 968, (xviii) SEQ ID NOs: 969 and 970, (xix) SEQ ID NOs: 971 and 972, (xx) SEQ ID NOs: 973 and 2004, (xxi) SEQ ID NOs: 974 and 975, (xxii) SEQ ID NOs: 976 and 977, (xxiii) SEQ ID NOs: 978 and 979, (xxiv) SEQ ID NOs: 980 and 981, (xxv) SEQ ID NOs: 982 and 983, (xxvi) SEQ ID NOs: 984 and 985, (xxvii) SEQ ID NOs: 986 and 987, (xxviii) SEQ ID NOs: 988 and 989, (xxix) SEQ ID NOs: 990 and 991, (xxx) SEQ ID NOs: 992 and 993, (xxxi) SEQ ID NOs: 994 and 995, (xxxii) SEQ ID NOs: 996 and 997, (xxxiii) SEQ ID NOs: 998 and 999, (xxxiv) SEQ ID NOs: 1000 and 1001, (xxxv) SEQ ID NOs: 1002 and 1003, (xxxvi) SEQ ID NOs: 1004 and 1005, (xxxvii) SEQ ID NOs: 1006 and 1007, (xxxviii) SEQ ID NOs: 1008 and 1009, (xxxix) SEQ ID NOs: 1010 and 1011, (xl) SEQ ID NOs: 1012 and 1013, (xli) SEQ ID NOs: 1014 and 1015, (xlii) SEQ ID NOs: 1016 and 1017, (xliii) SEQ ID NOs: 1018 and 1019, (xliv) SEQ ID NOs: 1020 and 1021, (xlv) SEQ ID NOs: 1024 and 1025, (xlvi) SEQ ID NOs: 1026 and 1027, (xlvii) SEQ ID NOs: 1028 and 1029, (xlviii) SEQ ID NOs: 1030 and 1031, (xlix) SEQ ID NOs: 1032 and 1033, (1) SEQ ID NOs: 1034 and 1035, (li) SEQ ID NOs: 1036 and 1037, (lii) SEQ ID NOs: 1038 and 1039, (liii) SEQ ID NOs: 1040 and 1041, (liv) SEQ ID NOs: 1042 and 1043, (lv) SEQ ID NOs: 1042 and 1045, (lvi) SEQ ID NOs: 1044 and 1043, (lvii) SEQ ID NOs: 1044 and 1045, (lviii) SEQ ID NOs: 1046 and 1049, (lix) SEQ ID NOs: 1046 and 1050, (lx) SEQ ID NOs: 1046 and 1051, (lxi) SEQ ID NOs: 1047 and 1049, (lxii) SEQ ID NOs: 1047 and 1050, (lxiii) SEQ ID NOs: 1047 and 1051, (lxiv) SEQ ID NOs: 1048 and 1049, (lxv) SEQ ID NOs: 1048 and 1050, (lxvi) SEQ ID NOs: 1048 and 1051, (lxvii) SEQ ID NOs: 1052 and 1054, (lxviii) SEQ ID NOs: 1052 and 1055, (lxix) SEQ ID NOs: 1053 and 1054, (lxx) SEQ ID NOs: 1053 and 1055, (lxxi) SEQ ID NOs: 1056 and 1057, (lxxii) SEQ ID NOs: 1058 and 1059, (lxxiii) SEQ ID NOs: 1060 and 1061, (lxxiv) SEQ ID NOs: 1062 and 1063, (lxxv) SEQ ID NOs: 1064 and 1065, (lxxvi) SEQ ID NOs: 1066 and 1067, (lxxvii) SEQ ID NOs: 1068 and 1069, (lxxviii) SEQ ID NOs: 1070 and 915, (lxxix) SEQ ID NOs: 1074 and 915, (lxxx) SEQ ID NOs: 1078 and 915, (lxxxi) SEQ ID NOs: 1082 and 915, (lxxxii) SEQ ID NOs: 1086 and 915, (lxxxiii) SEQ ID NOs: 1090 and 915, (lxxxix) SEQ ID NOs: 1094 and 915, (lxxxv) SEQ ID NOs: 1098 and 915, (lxxxvi) SEQ ID NOs: 1102 and 915, (lxxxvii) SEQ ID NOs: 1106 and 915, (lxxxviii) SEQ ID NOs: 1110 and 915, (lxxxix) SEQ ID NOs: 1114 and 915, (xc) SEQ ID NOs: 1118 and 915, (xci) SEQ ID NOs: 1122 and 915, (xcii) SEQ ID NOs: 1126 and 915, (xciii) SEQ ID NOs: 1130 and 915, (xciv) SEQ ID NOs: 1134 and 915, (xcv) SEQ ID NOs: 1138 and 915, (xcvi) SEQ ID NOs: 1142 and 915, (xcvii) SEQ ID NOs: 1146 and 915, (xcviii) SEQ ID NOs: 1150 and 915, (xcix) SEQ ID NOs: 1154 and 915, (c) SEQ ID NOs: 1158 and 915, (ci) SEQ ID NOs: 1162 and 915, (cii) SEQ ID NOs: 1166 and 915, (ciii) SEQ ID NOs: 1170 and 915, (civ) SEQ ID NOs: 1174 and 915, (cv) SEQ ID NOs: 1178 and 915, (cvi) SEQ ID NOs: 1182 and 915, (cvii) SEQ ID NOs: 1186 and 915, (cviii) SEQ ID NOs: 1189 and 915, (cix) SEQ ID NOs: 1192 and 915, (cx) SEQ ID NOs: 1196 and 915, (cxi) SEQ ID NOs: 1200 and 915, (cxii) SEQ ID NOs: 1204 and 915, (cxiii) SEQ ID NOs: 1208 and 915, (cxiv) SEQ ID NOs: 1212 and 915, (cxv) SEQ ID NOs: 1216 and 915, (cxvi) SEQ ID NOs: 1220 and 915, (cxvii) SEQ ID NOs: 1224 and 915, (cxviii) SEQ ID NOs: 1228 and 915, (cxix) SEQ ID NOs: 1232 and 915, (cxx) SEQ ID NOs: 1236 and 915, (cxxi) SEQ ID NOs: 1240 and 915, (cxxii) SEQ ID NOs: 1244 and 915, (cxxiii) SEQ ID NOs: 1248 and 915, (cxxiv) SEQ ID NOs: 1252 and 915, and (cxxv) SEQ ID NOs: 1256 and 915, as shown in FIGS. 26A-26Z. Additionally, any sequence included in FIG. 26 can also be individually included or excluded. It should be noted that these ABDs can be included in any of the heterodimeric formats described herein. In some embodiments, the NKEs of the invention include at least one anti-NKG2D antigen binding domain, as described herein and in the Figures. Described herein are a plurality of means for binding the ECD of human NKG2D.

[0157] 2. NKp46 Antigen Binding Domains

[0158] In some embodiments, the NKEs include an ABD that binds to the ECD of human NKp46. Suitable variable heavy VH and variable light VL domains that bind to the ECD of human NKp46 include, but are not limited to, VH/VL pairs selected from the group including: (i) SEQ ID NOs: 133 and 134, (ii) SEQ ID NOs: 135 and 136, (iii) SEQ ID NOs: 137 and 138, (iv) SEQ ID NOs: 139 and 140, (v) SEQ ID NOs: 141 and 142, (vi) SEQ ID NOs: 143 and 144, (vii) SEQ ID NOs: 146 and 147, (viii) SEQ ID NOs: 148 and 149, (ix) SEQ ID NOs: 150 and 151, (x) SEQ ID NOs: 152 and 153, (xi) SEQ ID NOs: 154 and 155, and (xii) SEQ ID NOs: 156 and 157, as shown in FIGS. 11A-11C. Additionally, any sequence included in FIG. 11 can also be individually included or excluded. It should be noted that these ABDs can be included in any of the formats described herein. In some embodiments, the NKEs of the invention include at least one anti-NKp46 antigen binding domain, as described herein and in the Figures. Described herein are a plurality of means for binding the ECD of human NKp46.

[0159] 3. NKp30 Antigen Binding Domains

[0160] In some embodiments, the NKEs include an ABD that binds to the ECD of human NKp30. Suitable variable heavy VH and variable light VL domains that bind to the ECD of human NKp30 include, but are not limited to, VH/VL pairs selected from the group including: (i) SEQ ID NOs: 158 and 159, (ii) SEQ ID NOs: 160 and 161, and (iii) SEQ ID NOs: 162 and 163, as shown in FIGS. 12, as well as those disclosed herein. Additionally, any sequence included in FIG. 12 can also be individually included or excluded. It should be noted that these ABDs can be included in any of the formats described herein. In some embodiments, the NKEs of the invention include at least one anti-NKp30 antigen binding domain, as described herein and in the Figures. Described herein are a plurality of means for binding the ECD of human NKp30.

[0161] In some embodiments, provided herein is an anti-human NKp30 antigen binding domain with a variable heavy domain and a variable light domain set selected from the group including: (a) a VH with the amino acid sequence depicted in SEQ ID NO:7302 and a VL with the amino acid sequence depicted in SEQ ID NO:7305; (b) a VH with the amino acid sequence depicted in SEQ ID NO:7302 and a VL with the amino acid sequence depicted in SEQ ID NO:7309; (c) a VH with the amino acid sequence depicted in SEQ ID NO:6121 and a VL with the amino acid sequence depicted in SEQ ID NO:7294; and (d) a VH with an amino acid sequence selected from the group including SEQ ID NO:7298 or 7300-7304 and a VL with an amino acid sequence selected from the group including SEQ ID NO:7299 or 7305-7309, wherein the sequences are as shown in US2021/0371523 hereby expressly incorporated by reference for the sequences. Additionally, any sequence included above from US2021/0371523 can also be individually included or excluded.

[0162] In some embodiments, provided herein is an anti-human NKp30 antigen binding domain with a variable heavy domain and a variable light domain set selected from the group including: (a) a VH with the amino acid sequence depicted in SEQ ID NO:30 and a VL with the amino acid sequence depicted in SEQ ID NO:32; (b) a VH with the amino acid sequence depicted in SEQ ID NO21: and a VL with the amino acid sequence depicted in SEQ ID NO:23; and (c) a VH with the amino acid sequence depicted in SEQ ID NO:11 and a VL with the amino acid sequence depicted in SEQ ID NO:13; wherein the sequences are as shown in WO2021/143858 hereby expressly incorporated by reference for the sequences. Additionally, any sequence included above from WO2021/143858 can also be individually included or excluded.

[0163] An anti-human NKp30 antigen binding domain with a variable heavy domain and a variable light domain set selected from the group including: (a) a VH with the amino acid sequence depicted in SEQ ID NO:14 and a VL with the amino acid sequence depicted in SEQ ID NO:18; (b) a VH with the amino acid sequence depicted in SEQ ID NO:25 and a VL with the amino acid sequence depicted in SEQ ID NO:18; (c) a VH with the amino acid sequence depicted in SEQ ID NO:72 and a VL with the amino acid sequence depicted in SEQ ID NO:18; (d) a VH with the amino acid sequence depicted in SEQ ID NO:78 and a VL with the amino acid sequence depicted in SEQ ID NO:80; and E a VH with the amino acid sequence depicted in SEQ ID NO:79 and a VL with the amino acid sequence depicted in SEQ ID NO:81; wherein the sequences are as shown in WO2019/226617 hereby expressly incorporated by reference for the sequences. For instance, the antibodies mAb8, mAb9, mAb10 and mAb11 of WO2019/226617 are useful NKp30 ABDs. Additionally, any sequence included above from WO2019/226617 can also be individually included or excluded.

[0164] B. Tumor Target Antigen Binding Domains

[0165] The present invention provides NKEs that bind to human NK cells and additionally bind to the extracellular domains of human tumor target antigens (TTAs), including, but not limited to, EGFR, Trop2 (or “Trop-2”), CD20, B7H3, FLT3, DLL3, CD19, CD123, CEA, MSLN, BCMA, CAIX, CLDN18.2, HER2, PD-1, CD22, CD38, and ANOL. Binding affinities of a specific TTA ABD can be evaluated using an assay recognized by those skilled in the art including, but not limited to, a Surface Plasmon Resonance (SPR) and/or a BLI binding assay (such as Biacore, Octet, or Caterra LSA).

[0166] 1. B7H3 Antigen Binding Domains

[0167] In some embodiments, the NKEs include an ABD that binds to the ECD of human B7H3. Suitable variable heavy VH and variable light VL domains that bind to the ECD of human B7H3 include, but are not limited to, VH/VL pairs selected from the group including: (i) SEQ ID NOs: 1260 and 1264, (ii) SEQ ID NOs: 1268 and 1272, (iii) SEQ ID NOs: 1276 and 1280, (iv) SEQ ID NOs: 1284 and 1288, (v) SEQ ID NOs: 1292 and 1296, (vi) SEQ ID NOs: 1300 and 1296, (vii) SEQ ID NOs: 1301 and 1296, (viii) SEQ ID NOs: 1302 and 1296, (ix) SEQ ID NOs: 1303 and 1296, (x) SEQ ID NOs: 1304 and 1296, (xi) SEQ ID NOs: 1305 and 1296, (xii) SEQ ID NOs: 1306 and 1296, (xiii) SEQ ID NOs: 1307 and 1296, (xiv) SEQ ID NOs: 1308 and 1296, (xv) SEQ ID NOs: 1309 and 1296, (xvi) SEQ ID NOs: 1310 and 1296, (xvii) SEQ ID NOs: 1311 and 1296, (xviii) SEQ ID NOs: 1312 and 1296, (xix) SEQ ID NOs: 1313 and 1296, (xx) SEQ ID NOs: 1314 and 1296, (xxi) SEQ ID NOs: 1315 and 1296, (xxii) SEQ ID NOs: 1316 and 1296, (xxiii) SEQ ID NOs: 1317 and 1296, (xxiv) SEQ ID NOs: 1318 and 1296, (xxv) SEQ ID NOs: 1319 and 1296, (xxvi) SEQ ID NOs: 1320 and 1296, (xxvii) SEQ ID NOs: 1321 and 1296, (xxviii) SEQ ID NOs: 1322 and 1296, (xxix) SEQ ID NOs: 1323 and 1296, (xxx) SEQ ID NOs: 1324 and 1296, (xxxi) SEQ ID NOs: 1325 and 1296, (xxxii) SEQ ID NOs: 1326 and 1296, (xxxiii) SEQ ID NOs: 1327 and 1296, (xxxiv) SEQ ID NOs: 1328 and 1296, (xxxv) SEQ ID NOs: 1329 and 1296, (xxxvi) SEQ ID NOs: 1330 and 1296, (xxxvii) SEQ ID NOs: 1331 and 1296, (xxxviii) SEQ ID NOs: 1332 and 1296, (xxxix) SEQ ID NOs: 1333 and 1296, (xl) SEQ ID NOs: 1334 and 1296, (xli) SEQ ID NOs: 1335 and 1296, (xlii) SEQ ID NOs: 1336 and 1296, (xliii) SEQ ID NOs: 1337 and 1296, (xliv) SEQ ID NOs: 1338 and 1296, (xlv) SEQ ID NOs: 1339 and 1296, (xlvi) SEQ ID NOs: 1340 and 1296, (xlvii) SEQ ID NOs: 1341 and 1296, (xlviii) SEQ ID NOs: 1342 and 1296, (xlix) SEQ ID NOs: 1343 and 1296, (1) SEQ ID NOs: 1344 and 1296, (li) SEQ ID NOs: 1345 and 1296, (lii) SEQ ID NOs: 1346 and 1296, (liii) SEQ ID NOs: 1347 and 1296, (liv) SEQ ID NOs: 1348 and 1296, (lv) SEQ ID NOs: 1349 and 1296, (lvi) SEQ ID NOs: 1350 and 1296, (lvii) SEQ ID NOs: 1351 and 1296, (lviii) SEQ ID NOs: 1352 and 1296, (lix) SEQ ID NOs: 1353 and 1296, (lx) SEQ ID NOs: 1354 and 1296, (lxi) SEQ ID NOs: 1355 and 1296, (lxii) SEQ ID NOs: 1356 and 1296, (lxiii) SEQ ID NOs: 1357 and 1296, (lxiv) SEQ ID NOs: 1358 and 1296, (lxv) SEQ ID NOs: 1359 and 1296, (lxvi) SEQ ID NOs: 1360 and 1296, (lxvii) SEQ ID NOs: 1361 and 1296, (lxviii) SEQ ID NOs: 1362 and 1296, (lxix) SEQ ID NOs: 1363 and 1296, (lxx) SEQ ID NOs: 1364 and 1296, (lxxi) SEQ ID NOs: 1365 and 1296, (lxxii) SEQ ID NOs: 1366 and 1296, (lxxiii) SEQ ID NOs: 1367 and 1296, (lxxiv) SEQ ID NOs: 1368 and 1296, (lxxv) SEQ ID NOs: 1369 and 1296, (lxxvi) SEQ ID NOs: 1370 and 1296, (lxxvii) SEQ ID NOs: 1371 and 1296, (lxxviii) SEQ ID NOs: 1372 and 1296, (lxxix) SEQ ID NOs: 1373 and 1296, (lxxx) SEQ ID NOs: 1374 and 1296, (lxxxi) SEQ ID NOs: 1375 and 1296, (lxxxii) SEQ ID NOs: 1376 and 1296, (lxxxiii) SEQ ID NOs: 1377 and 1296, (lxxxix) SEQ ID NOs: 1378 and 1296, (lxxxv) SEQ ID NOs: 1379 and 1296, (lxxxvi) SEQ ID NOs: 1380 and 1296, (lxxxvii) SEQ ID NOs: 1381 and 1296, (lxxxviii) SEQ ID NOs: 1382 and 1296, (lxxxix) SEQ ID NOs: 1383 and 1296, (xc) SEQ ID NOs: 1384 and 1296, (xci) SEQ ID NOs: 1385 and 1296, (xcii) SEQ ID NOs: 1386 and 1296, and (xciii) SEQ ID NOs: 1387 and 1296, as shown in FIGS. 27, 28, 29A-29H, and 30A-30R, as well as those disclosed herein. Additionally, any sequence included in FIGS. 27, 28, 29 and 30 can also be individually included or excluded. It should be noted that these ABDs can be included in any of the heterodimeric formats described herein.

[0168] Additionally, included herein are B7H3 ABDs that have the variable heavy chain depicted in SEQ ID NO: 11 or SEQ ID NO: 13, and variable light chain depicted in SEQ ID NO: 12 or SEQ ID NO: 14 from U.S. Pat. No. 10,501,544, incorporated by reference in its entirety, with particularity for relevant disclosure pertaining to B7H3 ABDs and the accompanying sequences described therein. Additionally, any sequence included above from U.S. Pat. No. 10,501,544 can also be individually included or excluded. Further, included herein are B7H3 antigen binding domain with: a) the VH CDRs depicted in SEQ ID NO: 1, SEQ ID NO: 25, and SEQ ID NO: 33 in combination with the VL CDRs depicted in SEQ ID NO: 34, SEQ ID NO: 36, and SEQ ID NO: 6; or b) the VH CDRs depicted in SEQ ID NO: 1, SEQ ID NO: 25, and SEQ ID NO: 10 in combination with the VL CDRs depicted in SEQ ID NO: 38, SEQ ID NO: 30, and SEQ ID NO: 6; both from U.S. Pat. No. 9,963,509, incorporated by reference in its entirety, with particularity for relevant disclosure pertaining to B7H3 ABDs and the accompanying sequences described therein. Additionally, any sequence included above from U.S. Pat. No. 9,963,509 can also be individually included or excluded. Further, included herein are anti-B7H3 antigen binding domains with the VH CDRs depicted in SEQ ID NO: 1, SEQ ID NO: 9, and SEQ ID NO: 10 in combination with the VL CDRs depicted in SEQ ID NO: 11, SEQ ID NO: 312, and SEQ ID NO: 6; from U.S. Pat. No. 10,865,245, incorporated by reference in its entirety, with particularity for relevant disclosure pertaining to B7H3 ABDs and the accompanying sequences described therein. Additionally, any sequence included above from U.S. Pat. No. 10,865,245 can also be individually included or excluded. Still further, included herein are anti-B7H3 antigen binding domain with: a) vhCDR1 with the sequence depicted in SEQ ID NO: 110; b) vhCDR2 with the sequence depicted in SEQ ID NO: 111; c) vhCDR3 with the sequence depicted in SEQ ID NO: 113; d) vlCDR1 with the sequence depicted in SEQ ID NO: 114; e) vlCDR2 with the sequence depicted in SEQ ID NO: 115; and f) vlCDR3 with the sequence depicted in SEQ ID NO: 116, from WO2020/033702, incorporated by reference in its entirety, with particularity for relevant disclosure pertaining to B7H3 ABDs and the accompanying sequences described therein. Additionally, any sequence included above from WO2020/033702 can also be individually included or excluded. Yet further, included herein is an anti-B7H3 antigen binding domain with: a) vhCDR1 with the sequence depicted in SEQ ID NO: 118; b) vhCDR2 with the sequence depicted in SEQ ID NO: 119; c) vhCDR3 with the sequence depicted in SEQ ID NO: 120; d) vlCDR1 with the sequence depicted in SEQ ID NO: 121; e) vlCDR2 with the sequence depicted in SEQ ID NO: 122; and f) vlCDR3 with the sequence depicted in SEQ ID NO: 123, from WO2020/033702, incorporated by reference in its entirety, with particularity for relevant disclosure pertaining to B7H3 ABDs and the accompanying sequences described therein. Additionally, any sequence included above from WO2020/033702 can also be individually included or excluded. Still even further, included herein is an anti-B7H3 antigen binding domain with: a) vhCDR1 with the sequence depicted in SEQ ID NO: 371; b) vhCDR2 with the sequence depicted in SEQ ID NO: 372; c) vhCDR3 with the sequence depicted in SEQ ID NO: 373; d) vlCDR1 with the sequence depicted in SEQ ID NO: 374; e) vlCDR2 with the sequence depicted in SEQ ID NO: 375; and f) vlCDR3 with the sequence depicted in SEQ ID NO: 376, from WO2020/033702, incorporated by reference in its entirety, with particularity for relevant disclosure pertaining to B7H3 ABDs and the accompanying sequences described therein. Additionally, any sequence included above from WO2020/033702 can also be individually included or excluded. Yet still even further, included herein is an anti-B7H3 antigen binding domain comprising: a) a heavy chain variable region comprising a vhCDR1 having SEQ ID NO: 6, a vhCDR2 having SEQ ID NO: 7, and a vhCDR3 having SEQ ID NO: 8; and b) a light chain variable region comprising a vlCDR1 having SEQ ID NO: 9, a vlCDR2 with the sequence WAS (tryptophan-alanine-serine) and a vlCDR3 having SEQ ID NO: 10, the sequences are depicted in WO2022/105879, hereby incorporated by reference for these sequences. Further, included herein is an anti-B7H3 antigen binding domain comprising a variable heavy chain and a variable light chain pair selected from the group including: a) a VH having SEQ ID NO:1 and a VL having SEQ ID NO:5; b) a VH having SEQ ID NO:11 and a VL having SEQ ID NO:15; c) a VH having SEQ ID NO:21 and a VL having SEQ ID NO:25; d) a VH having SEQ ID NO:31 and a VL having SEQ ID NO:35; e) a VH having SEQ ID NO:41 and a VL having SEQ ID NO:45; f) a VH having SEQ ID NO:55 and a VL having SEQ ID NO:57; g) a VH having SEQ ID NO:63 and a VL having SEQ ID NO:35; and h) a VH having SEQ ID NO:63 and a VL having SEQ ID NO:68, wherein the sequences are as depicted in U.S. Pat. No. 11,071,788, hereby incorporated by reference for these sequences. Additionally, any sequence included above from U.S. Pat. No. 11,071,788 can also be individually included or excluded.

[0169] In some embodiments, the NKEs of the invention include at least one anti-B7H3 antigen binding domain, as described herein and in the Figures. Described herein is a plurality of means for binding the ECD of human B7H3.

[0170] 2. EGFR Antigen Binding Domains

[0171] In some embodiments, the NKEs include an ABD that binds to the ECD of human EGFR. Suitable variable heavy VH and variable light VL domains that bind to the ECD of human EGFR include, but are not limited to, VH/VL pairs selected from the group including: (i) SEQ ID NOs: 164 and 165, (ii) SEQ ID NOs: 166 and 167, (iii) SEQ ID NOs: 168 and 169, (iv) SEQ ID NOs: 170 and 171, (v) SEQ ID NOs: 172 and 173, (vi) SEQ ID NOs: 174 and 175, (vii) SEQ ID NOs: 176 and 177, (viii) SEQ ID NOs: 178 and 179, (ix) SEQ ID NOs: 180 and 181, (x) SEQ ID NOs: 182 and 183, (xi) SEQ ID NOs: 184 and 185, and (xii) SEQ ID NOs: 186 and 187, as shown in FIGS. 13A-13C, as well as those disclosed herein. Additionally, any sequence included in FIG. 13 can also be individually included or excluded. It should be noted that these ABDs can be included in any of the formats described herein.

[0172] Further, included herein is an anti-EGFR antigen binding domain with sequences selected from the group including: a) a VH shown in SEQ ID NO:11 and VL shown in SEQ ID NO:13; b) VH shown in SEQ ID NO:11 and VL shown in SEQ ID NO:16; c) a VH shown in SEQ ID NO:32 and VL shown in SEQ ID NO:33; and d) VH shown in SEQ ID NO:1 and VL shown in SEQ ID NO:16, wherein the sequences are as shown in WO2022/031935, hereby expressly incorporated by reference for the sequences. Additionally, any sequence included above from WO2022/031935 can also be individually included or excluded.

[0173] In some embodiments, the NKEs of the invention include at least one anti-EGFR antigen binding domain, as described herein and in the Figures. Described herein is a plurality of means for binding the ECD of human EGFR.

[0174] 3. HER2 Antigen Binding Domains

[0175] In some embodiments, the TTA binds to the ECD of human HER2. Suitable variable heavy VH and variable light VL domains that bind to the ECD of human HER2 include, but are not limited to, VH/VL pairs selected from the group including: (i) SEQ ID NOs: 275 and 276, (ii) SEQ ID NOs: 277 and 278, (iii) SEQ ID NOs: 279 and 280, (iv) SEQ ID NOs: 281 and 282, (v) SEQ ID NOs: 283 and 284, (vi) SEQ ID NOs: 285 and 286, and (vii) SEQ ID NOs: 287 and 288, as shown in FIGS. 20A-20B. Additionally, any sequence included in FIG. 20 can also be individually included or excluded. It should be noted that these ABDs can be included in any of the formats described herein.

[0176] In some embodiments, the NKEs of the invention include at least one anti-HER2 antigen binding domain, as described herein and in the Figures. Described herein is a plurality of means for binding the ECD of human HER2.

[0177] 4. CD19 Antigen 1Binding Domains

[0178] In some embodiments, the TTA binds to the ECD of human CD19. Suitable variable heavy VH and variable light VL domains that bind to the ECD of human CD19 include, but are not limited to, VH/VL pairs selected from the group including: (i) SEQ ID NOs: 188 and 189, (ii) SEQ ID NOs: 190 and 191, (iii) SEQ ID NOs: 192 and 193, and (iv) SEQ ID NOs: 194 and 195, as shown in FIG. 14. Additionally, any sequence included in FIG. 14 can also be individually included or excluded. It should be noted that these ABDs can be included in any of the formats described herein.

[0179] In some embodiments, the NKEs of the invention include at least one anti-CD19 antigen binding domain, as described herein and in the Figures. Described herein is a plurality of means for binding the ECD of human CD19.

[0180] 5. CD20 Antigen Binding Domains

[0181] In some embodiments, the NKEs include an ABD that binds to the ECD of human CD20. Suitable variable heavy VH and variable light VL domains that bind to the ECD of human CD20 include, but are not limited to, VH/VL pairs selected from the group including: (i) SEQ ID NOs: 196 and 197, (ii) SEQ ID NOs: 198 and 199, (iii) SEQ ID NOs: 200 and 201, (iv) SEQ ID NOs: 202 and 203, (v) SEQ ID NOs: 204 and 205, (vi) SEQ ID NOs: 206 and 207, (vii) SEQ ID NOs: 208 and 209, (viii) SEQ ID NOs: 210 and 211, (ix) SEQ ID NOs: 212 and 213, (x) SEQ ID NOs: 214 and 215, (xi) SEQ ID NOs: 216 and 217, (xii) SEQ ID NOs: 218 and 219, (xiii) SEQ ID NOs: 220 and 221, (xiv) SEQ ID NOs: 222 and 223, and (xv) SEQ ID NOs: 224 and 225, as shown in FIGS. 15A-15C. Additionally, any sequence included in FIG. 15 can also be individually included or excluded. It should be noted that these ABDs can be included in any of the formats described herein.

[0182] In some embodiments, the NKEs of the invention include at least one anti-CD20 antigen binding domain, as described herein and in the Figures. Described herein is a plurality of means for binding the ECD of human CD20.

[0183] 6. CD123 Antigen Binding Domains

[0184] In some embodiments, the TTA binds to the ECD of human CD123. Suitable variable heavy VH and variable light VL domains that bind to the ECD of human CD123 include, but are not limited to, VH/VL pairs selected from the group including: (i) SEQ ID NOs: 833 and 834, and (ii) SEQ ID NOs: 835 and 836, as shown in FIG. 23. Additionally, any sequence included in FIG. 23 can also be individually included or excluded. It should be noted that these ABDs can be included in any of the formats described herein.

[0185] In some embodiments, the NKEs of the invention include at least one anti-CD123 antigen binding domain, as described herein and in the Figures. Described herein is a means for binding the ECD of human CD123 antigen.

[0186] 7. CAIX Antigen Binding Domains

[0187] In some embodiments, the tumor target antigen (TTA) for use herein bind to the ECD of human carbonic anhydrase 9 (CAIX or CA9). In this case, the amino acid sequences of the variable heavy and variable light chain can be selected from the group including the amino acid sequences depicted in SEQ ID NO:72 and SEQ ID NO:73 of WO2018/157147; SEQ ID NO:80 and SEQ ID NO:81 as depicted in WO2018/157147, and SEQ ID NO:88 and SEQ ID NO:89 as depicted in WO2018/157147; the heavy and light variable domains of girentuximab, shown in FIG. 23; SEQ ID NO:9 and SEQ ID NO:10 as depicted in US2009/0162382; and SEQ ID NO:17 and SEQ ID NO:19 as depicted in US2009/0162382. Additionally, any sequence described in this paragraph can also be individually included or excluded.

[0188] In some embodiments, the NKEs of the invention include at least one anti-CAIX antigen binding domain, as described herein and in the Figures (see, e.g., FIG. 23 and SEQ ID NOs: 831 and 832). Described herein is a plurality of means for binding the ECD of human CAIX.

[0189] 8. FLT3 Antigen Binding Domains

[0190] In some embodiments, the NKEs include an ABD that binds to the ECD of human FLT3. Suitable variable heavy VH and variable light VL domains that bind to the ECD of human FLT3 include, but are not limited to, VH/VL pairs selected from the group including: (i) SEQ ID NOs: 267 and 268, (ii) SEQ ID NOs: 269 and 270, (iii) SEQ ID NOs: 271 and 272, (iv) SEQ ID NOs: 273 and 274, (v) SEQ ID NOs: 275 and 276, (vi) SEQ ID NOs: 277 and 278, (vii) SEQ ID NOs: 279 and 280, and (viii) SEQ ID NOs: 281 and 282, as shown in FIG. 19, as well as those disclosed herein. Additionally, any sequence included in FIG. 19 can also be individually included or excluded. It should be noted that these ABDs can be included in any of the formats described herein.

[0191] Further, included herein is an anti-FLT3 antigen binding domain with a VH/VL pair selected from the group including: a) a variable heavy domain with SEQ ID NO: 187 and a variable light domain with SEQ ID NO: 188; b) a variable heavy domain with SEQ ID NO: 207 and a variable light domain with SEQ ID NO: 208; c) a variable heavy domain with SEQ ID NO: 217 and a variable light domain with SEQ ID NO: 218; d) a variable heavy domain with SEQ ID NO: 227 and a variable light domain with SEQ ID NO: 228; e) a variable heavy domain with SEQ ID NO: 257 and a variable light domain with SEQ ID NO: 258; f) a variable heavy domain with SEQ ID NO: 267 and a variable light domain with SEQ ID NO: 268; g) a variable heavy domain with SEQ ID NO: 277 and a variable light domain with SEQ ID NO: 278; h) a variable heavy domain with SEQ ID NO: 287 and a variable light domain with SEQ ID NO: 288; i) a variable heavy domain with SEQ ID NO: 297 and a variable light domain with SEQ ID NO: 298; j) a variable heavy domain with SEQ ID NO: 307 and a variable light domain with SEQ ID NO: 308; k) a variable heavy domain with SEQ ID NO: 317 and a variable light domain with SEQ ID NO: 318; l) a variable heavy domain with SEQ ID NO: 337 and a variable light domain with SEQ ID NO: 338; m) a variable heavy domain with SEQ ID NO: 347 and a variable light domain with SEQ ID NO: 348; n) a variable heavy domain with SEQ ID NO: 437 and a variable light domain with SEQ ID NO: 438; o) a variable heavy domain with SEQ ID NO: 457 and a variable light domain with SEQ ID NO: 458; p) a variable heavy domain with SEQ ID NO: 467 and a variable light domain with SEQ ID NO: 468; q) a variable heavy domain with SEQ ID NO: 477 and a variable light domain with SEQ ID NO: 478; r) a variable heavy domain with SEQ ID NO: 497 and a variable light domain with SEQ ID NO: 498; s) a variable heavy domain with SEQ ID NO: 537 and a variable light domain with SEQ ID NO: 538; t) a variable heavy domain with SEQ ID NO: 547 and a variable light domain with SEQ ID NO: 548; u) a variable heavy domain with SEQ ID NO: 567 and a variable light domain with SEQ ID NO: 568; v) a variable heavy domain with SEQ ID NO: 597 and a variable light domain with SEQ ID NO: 598; w) a variable heavy domain with SEQ ID NO: 617 and a variable light domain with SEQ ID NO: 618; x) a variable heavy domain with SEQ ID NO: 637 and a variable light domain with SEQ ID NO: 638; y) a variable heavy domain with SEQ ID NO: 707 and a variable light domain with SEQ ID NO: 708; all as depicted in U.S. Pat. No. 11,447,567 and incorporated by reference herein. Additionally, any sequence included above from U.S. Pat. No. 11,447,567 can also be individually included or excluded.

[0192] Further, included herein is an anti-FLT3 antigen binding domain with a VH/VL pair selected from the group including: a) a variable heavy domain with SEQ ID NO: 20 and a variable light domain with SEQ ID NO: 19; b) a variable heavy domain with SEQ ID NO: 6 and a variable light domain with SEQ ID NO: 5; c) a variable heavy domain with SEQ ID NO: 4 and a variable light domain with SEQ ID NO: 3; d) a variable heavy domain with SEQ ID NO: 8 and a variable light domain with SEQ ID NO: 7; e) a variable heavy domain with SEQ ID NO: 10 and a variable light domain with SEQ ID NO: 9; f) a variable heavy domain with SEQ ID NO: 12 and a variable light domain with SEQ ID NO: 11; g) a variable heavy domain with SEQ ID NO: 14 and a variable light domain with SEQ ID NO: 13; h) a variable heavy domain with SEQ ID NO: 16 and a variable light domain with SEQ ID NO: 15; i) a variable heavy domain with SEQ ID NO: 18 and a variable light domain with SEQ ID NO: 17; j) a variable heavy domain with SEQ ID NO: 2 and a variable light domain with SEQ ID NO: 1; k) a variable heavy domain with SEQ ID NO: 22 and a variable light domain with SEQ ID NO: 21; l) a variable heavy domain with SEQ ID NO: 24 and a variable light domain with SEQ ID NO: 23; m) a variable heavy domain with SEQ ID NO: 26 and a variable light domain with SEQ ID NO: 25; n) a variable heavy domain with SEQ ID NO: 28 and a variable light domain with SEQ ID NO: 27; o) a variable heavy domain with SEQ ID NO: 30 and a variable light domain with SEQ ID NO: 29; p) a variable heavy domain with SEQ ID NO: 32 and a variable light domain with SEQ ID NO: 31; q) a variable heavy domain with SEQ ID NO: 34 and a variable light domain with SEQ ID NO: 33; r) a variable heavy domain with SEQ ID NO: 36 and a variable light domain with SEQ ID NO: 35; s) a variable heavy domain with SEQ ID NO: 205 and a variable light domain with SEQ ID NO: 204; t) a variable heavy domain with SEQ ID NO: 207 and a variable light domain with SEQ ID NO: 206; u) a variable heavy domain with SEQ ID NO: 209 and a variable light domain with SEQ ID NO: 208; v) a variable heavy domain with SEQ ID NO: 211 and a variable light domain with SEQ ID NO: 210; w) a variable heavy domain with SEQ ID NO: 213 and a variable light domain with SEQ ID NO: 212; x) a variable heavy domain with SEQ ID NO: 215 and a variable light domain with SEQ ID NO: 214; y) a variable heavy domain with SEQ ID NO: 217 and a variable light domain with SEQ ID NO: 216; z) a variable heavy domain with SEQ ID NO: 219 and a variable light domain with SEQ ID NO: 218; aa) a variable heavy domain with SEQ ID NO: 221 and a variable light domain with SEQ ID NO: 220; bb) a variable heavy domain with SEQ ID NO: 223 and a variable light domain with SEQ ID NO: 222; cc) a variable heavy domain with SEQ ID NO: 225 and a variable light domain with SEQ ID NO: 224; dd) a variable heavy domain with SEQ ID NO: 227 and a variable light domain with SEQ ID NO: 226; ee) a variable heavy domain with SEQ ID NO: 229 and a variable light domain with SEQ ID NO: 228; ff) a variable heavy domain with SEQ ID NO: 231 and a variable light domain with SEQ ID NO: 230 and gg) a variable heavy domain with SEQ ID NO: 233 and a variable light domain with SEQ ID NO: 232, all as shown in U.S. Pat. No. 11,421,040, hereby incorporated by reference for the sequences. Additionally, any sequence included above from U.S. Pat. No. 11,421,040 can also be individually included or excluded.

[0193] Further, included herein is an anti-FLT3 antigen binding domain (“CHv62.21”) with, the variable heavy domain depicted as part of SEQ ID NO: 11, and the variable light domain depicted as part of SEQ ID NO: 10 from U.S. Pat. No. 10,751,422, hereby incorporated by reference for the sequences. Additionally, any sequence included above from U.S. Pat. No. 10,751,422 can also be individually included or excluded.

[0194] Further, included herein is an anti-FLT3 antigen binding domain with a VH/VL pair selected from the group including: a) a variable heavy domain with SEQ ID NO: 9 and a variable light domain with SEQ ID NO: 10; b) a variable heavy domain with SEQ ID NO: 13 and a variable light domain with SEQ ID NO: 10; c) a variable heavy domain with SEQ ID NO: 17 and a variable light domain with SEQ ID NO: 10; d) a variable heavy domain with SEQ ID NO: 9 and a variable light domain with SEQ ID NO: 22; e) a variable heavy domain with SEQ ID NO: 37 and a variable light domain with SEQ ID NO: 38; f) a variable heavy domain with SEQ ID NO: 41 and a variable light domain with SEQ ID NO: 42; g) a variable heavy domain with SEQ ID NO: 45 and a variable light domain with SEQ ID NO: 42; h) a variable heavy domain with SEQ ID NO: 49 and a variable light domain with SEQ ID NO: 42; and i) a variable heavy domain with SEQ ID NO: 53 and a variable light domain with SEQ ID NO: 42; all as shown in WO2021/076564, hereby incorporated by reference for the sequences. Additionally, any sequence included above from WO2021/076564 can also be individually included or excluded.

[0195] Further, included herein is an anti-FLT3 antigen binding domain with a VH/VL pair selected from the group including: a) a variable heavy domain with SEQ ID NO: 187 and a variable light domain with SEQ ID NO: 288; b) a variable heavy domain with SEQ ID NO: 207 and a variable light domain with SEQ ID NO: 208; c) a variable heavy domain with SEQ ID NO: 217 and a variable light domain with SEQ ID NO: 218; d) a variable heavy domain with SEQ ID NO: 227 and a variable light domain with SEQ ID NO: 228; e) a variable heavy domain with SEQ ID NO: 257 and a variable light domain with SEQ ID NO: 258; f) a variable heavy domain with SEQ ID NO: 267 and a variable light domain with SEQ ID NO: 268; g) a variable heavy domain with SEQ ID NO: 277 and a variable light domain with SEQ ID NO: 278; h) a variable heavy domain with SEQ ID NO: 287 and a variable light domain with SEQ ID NO: 288; i) a variable heavy domain with SEQ ID NO: 297 and a variable light domain with SEQ ID NO: 298; j) a variable heavy domain with SEQ ID NO: 307 and a variable light domain with SEQ ID NO: 308; k) a variable heavy domain with SEQ ID NO: 317 and a variable light domain with SEQ ID NO: 318; l) a variable heavy domain with SEQ ID NO: 337 and a variable light domain with SEQ ID NO: 338; m) a variable heavy domain with SEQ ID NO: 347 and a variable light domain with SEQ ID NO: 348; n) a variable heavy domain with SEQ ID NO: 437 and a variable light domain with SEQ ID NO: 438; o) a variable heavy domain with SEQ ID NO: 457 and a variable light domain with SEQ ID NO: 458; p) a variable heavy domain with SEQ ID NO: 467 and a variable light domain with SEQ ID NO: 468; q) a variable heavy domain with SEQ ID NO: 477 and a variable light domain with SEQ ID NO: 478; r) a variable heavy domain with SEQ ID NO: 497 and a variable light domain with SEQ ID NO: 498; s) a variable heavy domain with SEQ ID NO: 537 and a variable light domain with SEQ ID NO: 538; t) a variable heavy domain with SEQ ID NO: 547 and a variable light domain with SEQ ID NO: 548; u) a variable heavy domain with SEQ ID NO: 567 and a variable light domain with SEQ ID NO: 568; v) a variable heavy domain with SEQ ID NO: 597 and a variable light domain with SEQ ID NO: 598; w) a variable heavy domain with SEQ ID NO: 617 and a variable light domain with SEQ ID NO: 618; x) a variable heavy domain with SEQ ID NO: 637 and a variable light domain with SEQ ID NO: 638; y) a variable heavy domain with SEQ ID NO: 707 and a variable light domain with SEQ ID NO: 708; all as shown in U.S. Pat. No. 11,447,567, hereby incorporated by reference for the sequences. Additionally, any sequence included above from U.S. Pat. No. 11,447,567 can also be individually included or excluded.

[0196] In some embodiments, the NKEs of the invention include at least one anti-FLT3 antigen binding domain, as described herein and in the Figures. Described herein is a plurality of means for binding the ECD of human FLT3.

[0197] 9. Mesothelin (MSLN) Antigen Binding Domains

[0198] In some embodiments, the NKEs include an ABD that binds to the ECD of human MSLN. Suitable variable heavy VH and variable light VL domains that bind to the ECD of human MSLN include, but are not limited to, VH/VL pairs selected from the group including: (i) SEQ ID NOs: 289 and 293, (ii) SEQ ID NOs: 297 and 301, (iii) SEQ ID NOs: 305 and 309, (iv) SEQ ID NOs: 313 and 314, (v) SEQ ID NOs: 315 and 316, (vi) SEQ ID NOs: 317 and 318, (vii) SEQ ID NOs: 319 and 320, (viii) SEQ ID NOs: 321 and 322, (ix) SEQ ID NOs: 323 and 324, (x) SEQ ID NOs: 325 and 326, (xi) SEQ ID NOs: 327 and 328, (xii) SEQ ID NOs: 329 and 330, (xiii) SEQ ID NOs: 331 and 332, (xiv) SEQ ID NOs: 333 and 334, (xv) SEQ ID NOs: 335 and 336, (xvi) SEQ ID NOs: 337 and 338, (xvii) SEQ ID NOs: 339 and 340, (xviii) SEQ ID NOs: 341 and 342, (xix) SEQ ID NOs: 343 and 344, (xx) SEQ ID NOs: 345 and 346, (xxi) SEQ ID NOs: 347 and 348, (xxii) SEQ ID NOs: 349 and 350, (xxiii) SEQ ID NOs: 351 and 352, (xxiv) SEQ ID NOs: 353 and 354, (xxv) SEQ ID NOs: 355 and 356, (xxvi) SEQ ID NOs: 357 and 358, (xxvii) SEQ ID NOs: 359 and 360, (xxviii) SEQ ID NOs: 361 and 362, (xxix) SEQ ID NOs: 363 and 364, (xxx) SEQ ID NOs: 365 and 366, (xxxi) SEQ ID NOs: 367 and 368, (xxxii) SEQ ID NOs: 369 and 370, (xxxiii) SEQ ID NOs: 371 and 372, (xxxiv) SEQ ID NOs: 373 and 374, (xxxv) SEQ ID NOs: 375 and 376, (xxxvi) SEQ ID NOs: 377 and 378, (xxxvii) SEQ ID NOs: 379 and 380, (xxxviii) SEQ ID NOs: 381 and 382, (xxxix) SEQ ID NOs: 383 and 384, (xl) SEQ ID NOs: 385 and 386, (xli) SEQ ID NOs: 387 and 388, (xlii) SEQ ID NOs: 389 and 390, (xliii) SEQ ID NOs: 391 and 392, (xliv) SEQ ID NOs: 393 and 394, (xlv) SEQ ID NOs: 395 and 396, (xlvi) SEQ ID NOs: 397 and 398, (xlvii) SEQ ID NOs: 399 and 400, (xlviii) SEQ ID NOs: 401 and 402, (xlix) SEQ ID NOs: 403 and 404, (1) SEQ ID NOs: 405 and 406, (li) SEQ ID NOs: 405 and 408, (lii) SEQ ID NOs: 407 and 406, (liii) SEQ ID NOs: 407 and 408, (liv) SEQ ID NOs: 409 and 410, (lv) SEQ ID NOs: 411 and 412, (lvi) SEQ ID NOs: 413 and 414, (lvii) SEQ ID NOs: 415 and 416, (lviii) SEQ ID NOs: 417 and 418, (lix) SEQ ID NOs: 419 and 420, (lx) SEQ ID NOs: 421 and 422, (lxi) SEQ ID NOs: 423 and 424, (lxii) SEQ ID NOs: 425 and 426, (lxiii) SEQ ID NOs: 427 and 428, (lxiv) SEQ ID NOs: 429 and 430, (lxv) SEQ ID NOs: 431 and 432, (lxvi) SEQ ID NOs: 433 and 434, (lxvii) SEQ ID NOs: 435 and 436, (lxviii) SEQ ID NOs: 437 and 438, (lxix) SEQ ID NOs: 439 and 440, (lxx) SEQ ID NOs: 441 and 442, (lxxi) SEQ ID NOs: 443 and 444, (lxxii) SEQ ID NOs: 445 and 446, (lxxiii) SEQ ID NOs: 447 and 448, (lxxiv) SEQ ID NOs: 449 and 450, (lxxv) SEQ ID NOs: 451 and 452, (lxxvi) SEQ ID NOs: 453 and 454, (lxxvii) SEQ ID NOs: 455 and 456, (lxxviii) SEQ ID NOs: 457 and 458, (lxxix) SEQ ID NOs: 459 and 460, (lxxx) SEQ ID NOs: 461 and 462, (lxxxi) SEQ ID NOs: 463 and 464, (lxxxii) SEQ ID NOs: 465 and 466, (lxxxiii) SEQ ID NOs: 467 and 468, (lxxxix) SEQ ID NOs: 469 and 470, (lxxxv) SEQ ID NOs: 471 and 472, (lxxxvi) SEQ ID NOs: 473 and 474, (lxxxvii) SEQ ID NOs: 475 and 476, (lxxxviii) SEQ ID NOs: 477 and 478, (lxxxix) SEQ ID NOs: 479 and 480, (xc) SEQ ID NOs: 481 and 482, (xci) SEQ ID NOs: 483 and 484, (xcii) SEQ ID NOs: 485 and 486, (xciii) SEQ ID NOs: 487 and 488, (xciv) SEQ ID NOs: 489 and 490, (xcv) SEQ ID NOs: 491 and 492, (xcvi) SEQ ID NOs: 493 and 494, (xcvii) SEQ ID NOs: 495 and 496, (xcviii) SEQ ID NOs: 497 and 498, (xcix) SEQ ID NOs: 499 and 500, (c) SEQ ID NOs: 501 and 502, (ci) SEQ ID NOs: 503 and 504, (cii) SEQ ID NOs: 505 and 506, (ciii) SEQ ID NOs: 507 and 508, (civ) SEQ ID NOs: 509 and 510, (cv) SEQ ID NOs: 511 and 512, (cvi) SEQ ID NOs: 513 and 514, (cvii) SEQ ID NOs: 515 and 516, (cviii) SEQ ID NOs: 517 and 518, (cix) SEQ ID NOs: 519 and 520, (cx) SEQ ID NOs: 521 and 522, (cxi) SEQ ID NOs: 523 and 524, (cxii) SEQ ID NOs: 525 and 526, (cxiii) SEQ ID NOs: 527 and 528, (cxiv) SEQ ID NOs: 529 and 530, (cxv) SEQ ID NOs: 531 and 532, (cxvi) SEQ ID NOs: 533 and 534, (cxvii) SEQ ID NOs: 535 and 536, (cxviii) SEQ ID NOs: 537 and 538, (cxix) SEQ ID NOs: 539 and 540, (cxx) SEQ ID NOs: 541 and 542, (cxxi) SEQ ID NOs: 543 and 544, (cxxii) SEQ ID NOs: 545 and 546, (cxxiii) SEQ ID NOs: 547 and 548, (cxxiv) SEQ ID NOs: 549 and 550, (cxxv) SEQ ID NOs: 551 and 552, (cxxvi) SEQ ID NOs: 553 and 554, (cxxvii) SEQ ID NOs: 555 and 556, (cxxviii) SEQ ID NOs: 557 and 558, (cxxix) SEQ ID NOs: 559 and 560, (cxxx) SEQ ID NOs: 561 and 562, (cxxxi) SEQ ID NOs: 563 and 564, (cxxxii) SEQ ID NOs: 565 and 566, (cxxxiii) SEQ ID NOs: 567 and 568, (cxxxiv) SEQ ID NOs: 569 and 570, (cxxxv) SEQ ID NOs: 571 and 572, (cxxxvi) SEQ ID NOs: 573 and 574, (cxxxvii) SEQ ID NOs: 575 and 576, (cxxxviii) SEQ ID NOs: 577 and 578, (cxl) SEQ ID NOs: 579 and 580, (cxli) SEQ ID NOs: 581 and 582, (cxlii) SEQ ID NOs: 583 and 584, (cxliii) SEQ ID NOs: 585 and 586, (cxliv) SEQ ID NOs: 587 and 588, (cxlv) SEQ ID NOs: 589 and 590, (cxlvi) SEQ ID NOs: 591 and 592, (cxlvii) SEQ ID NOs: 593 and 594, (cxlviii) SEQ ID NOs: 595 and 596, (cxlix) SEQ ID NOs: 597 and 598, (cl) SEQ ID NOs: 599 and 600, (cli) SEQ ID NOs: 601 and 602, (clii) SEQ ID NOs: 603 and 604, (cliii) SEQ ID NOs: 605 and 606, (cliv) SEQ ID NOs: 607 and 608, (clv) SEQ ID NOs: 609 and 610, (clvi) SEQ ID NOs: 611 and 612, (clvii) SEQ ID NOs: 613 and 614, (clviii) SEQ ID NOs: 615 and 616, (clviii) SEQ ID NOs: 617 and 618, (clix) SEQ ID NOs: 619 and 620, (clx) SEQ ID NOs: 621 and 622, (clxi) SEQ ID NOs: 623 and 624, (clxii) SEQ ID NOs: 625 and 626, (clxiii) SEQ ID NOs: 627 and 628, (clxiv) SEQ ID NOs: 629 and 630, (clxv) SEQ ID NOs: 631 and 632, (clxvi) SEQ ID NOs: 633 and 634, (clxvii) SEQ ID NOs: 635 and 636, (clxviii) SEQ ID NOs: 637 and 638, and (clxix) any one of SEQ ID NOs: 639-649 and any one of SEQ ID NOs: 650-669, as shown in FIGS. 21A-21FF, as well as those disclosed herein. It should be noted that these ABDs can be included in any of the formats described herein. Additionally, any sequence included above from FIG. 21 can also be individually included or excluded.

[0199] In some embodiments, an anti-human MSLN antigen binding domain includes a combination of VH and VL sequences, such as those shown in FIGS. 21EE and 21FF (see, e.g., SEQ ID NOs: 639-649 (VH sequences) and SEQ ID NOs: 650-669 (VL sequences)).

[0200] Additionally, any sequence included above from FIG. 21 can also be individually included or excluded.

[0201] Included herein is an anti-human MSLN antigen binding domain with sequences selected from the group including: a) a VH with the amino acid sequence shown in SEQ ID NO:106 and a VL with the amino acid sequence shown in SEQ ID NO:106; b) a VH with the amino acid sequence shown in SEQ ID NO:114 and a VL with the amino acid sequence shown in SEQ ID NO:15; and c) a VH with the amino acid sequence shown in SEQ ID NO:122 and a VL with the amino acid sequence shown in SEQ ID NO:123; wherein the sequences are as shown in Table 4 of WO2019/234220, hereby expressly incorporated by reference for the sequences. Additionally, any sequence included above from Table 4 of WO2019/234220 can also be individually included or excluded. In some cases, other anti-human MSLN antigen binding domains are described in WO2018/157147. Additionally, any sequence included above from WO2018/157147 can also be individually included or excluded.

[0202] In some embodiments, the NKEs of the invention include at least one anti-MSLN antigen binding domain, as described herein and in the Figures. Described herein is a plurality of means for binding the ECD of human MSLN.

[0203] 10. Trop-2 Antigen Binding Domains

[0204] In some embodiments, the NKEs include an ABD that binds to the ECD of human Trop2. Suitable variable heavy VH and variable light VL domains that bind to the ECD of human Trop2 include, but are not limited to, VH/VL pairs selected from the group including: (i) SEQ ID NOs: 670 and 671, (ii) SEQ ID NOs: 672 and 673, (iii) SEQ ID NOs: 674 and 675, (iv) SEQ ID NOs: 676 and 677, (v) SEQ ID NOs: 678 and 679, (vi) SEQ ID NOs: 680 and 681, (vii) SEQ ID NOs: 682 and 683, (viii) SEQ ID NOs: 684 and 681, (ix) SEQ ID NOs: 685 and 686, (x) SEQ ID NOs: 687 and 688, (xi) SEQ ID NOs: 689 and 690, (xii) SEQ ID NOs: 691 and 692, (xiii) SEQ ID NOs: 693 and 694, (xiv) SEQ ID NOs: 695 and 696, (xv) SEQ ID NOs: 697 and 698, (xvi) SEQ ID NOs: 699 and 700, (xvii) SEQ ID NOs: 701 and 702, (xviii) SEQ ID NOs: 703 and 704, (xix) SEQ ID NOs: 705 and 706, (xx) SEQ ID NOs: 707 and 708, (xxi) SEQ ID NOs: 709 and 710, (xxii) SEQ ID NOs: 711 and 712, (xxiii) SEQ ID NOs: 713 and 714, (xxiv) SEQ ID NOs: 715 and 716, (xxv) SEQ ID NOs: 717 and 718, (xxvi) SEQ ID NOs: 719 and 720, (xxvii) SEQ ID NOs: 721 and 722, (xxviii) SEQ ID NOs: 723 and 724, (xxix) SEQ ID NOs: 725 and 726, (xxx) SEQ ID NOs: 727 and 728, (xxxi) SEQ ID NOs: 729 and 730, (xxxii) SEQ ID NOs: 731 and 732, (xxxiii) SEQ ID NOs: 733 and 734, (xxxiv) SEQ ID NOs: 735 and 736, (xxxv) SEQ ID NOs: 737 and 738, (xxxvi) SEQ ID NOs: 739 and 740, (xxxvii) SEQ ID NOs: 741 and 742, (xxxviii) SEQ ID NOs: 743 and 744, (xxxix) SEQ ID NOs: 745 and 746, (xl) SEQ ID NOs: 747 and 748, (xli) SEQ ID NOs: 749 and 750, (xlii) SEQ ID NOs: 751 and 752, (xliii) SEQ ID NOs: 753 and 754, (xliv) SEQ ID NOs: 755 and 756, (xlv) SEQ ID NOs: 757 and 758, (xlvi) SEQ ID NOs: 759 and 760, (xlvii) SEQ ID NOs: 761 and 762, (xlviii) SEQ ID NOs: 763 and 764, (xlix) SEQ ID NOs: 765 and 766, (1) SEQ ID NOs: 767 and 768, (li) SEQ ID NOs: 769 and 770, (lii) SEQ ID NOs: 771 and 772, (liii) SEQ ID NOs: 773 and 774, (liv) SEQ ID NOs: 775 and 776, (lv) SEQ ID NOs: 777 and 778, (lvi) SEQ ID NOs: 779 and 780, (lvii) SEQ ID NOs: 781 and 782, (lviii) SEQ ID NOs: 783 and 784, (lix) SEQ ID NOs: 785 and 786, (lx) SEQ ID NOs: 787 and 788, (lxi) SEQ ID NOs: 789 and 790, (lxii) SEQ ID NOs: 791 and 792, (lxiii) SEQ ID NOs: 793 and 794, (lxiv) SEQ ID NOs: 795 and 800, (lxv) SEQ ID NOs: 795 and 801, (lxvi) SEQ ID NOs: 795 and 802, (lxvii) SEQ ID NOs: 796 and 800, (lxviii) SEQ ID NOs: 796 and 801, (lxix) SEQ ID NOs: 796 and 802, (lxx) SEQ ID NOs: 797 and 800, (lxxi) SEQ ID NOs: 797 and 801, (lxxii) SEQ ID NOs: 797 and 802, (lxxiii) SEQ ID NOs: 798 and 800, (lxxiv) SEQ ID NOs: 798 and 801, (lxxv) SEQ ID NOs: 798 and 802, (lxxvi) SEQ ID NOs: 799 and 800, (lxxvii) SEQ ID NOs: 799 and 801, (lxxviii) SEQ ID NOs: 799 and 802, (lxxix) SEQ ID NOs: 803 and 806, (lxxx) SEQ ID NOs: 803 and 807, (lxxxi) SEQ ID NOs: 803 and 808, (lxxxii) SEQ ID NOs: 804 and 806, (lxxxiii) SEQ ID NOs: 804 and 807, (lxxxix) SEQ ID NOs: 804 and 808, (lxxxv) SEQ ID NOs: 805 and 806, (lxxxvi) SEQ ID NOs: 805 and 807, (lxxxvii) SEQ ID NOs: 805 and 808, (lxxxviii) SEQ ID NOs: 809 and 812, (lxxxix) SEQ ID NOs: 809 and 813, (xc) SEQ ID NOs: 810 and 812, (xci) SEQ ID NOs: 810 and 813, (xcii) SEQ ID NOs: 811 and 812, (xciii) SEQ ID NOs: 811 and 813, (xciv) SEQ ID NOs: 814 and 816, (xcv) SEQ ID NOs: 814 and 817, (xcvi) SEQ ID NOs: 814 and 818, (xcvii) SEQ ID NOs: 815 and 816, (xcviii) SEQ ID NOs: 815 and 817, (xcix) SEQ ID NOs: 815 and 818, (c) SEQ ID NOs: 819 and 824, (ci) SEQ ID NOs: 819 and 825, (cii) SEQ ID NOs: 819 and 826, (ciii) SEQ ID NOs: 819 and 827, (civ) SEQ ID NOs: 819 and 828, (cv) SEQ ID NOs: 820 and 824, (cvi) SEQ ID NOs: 820 and 825, (cvii) SEQ ID NOs: 820 and 826, (cviii) SEQ ID NOs: 820 and 827, (cix) SEQ ID NOs: 820 and 828, (cx) SEQ ID NOs: 821 and 824, (cxi) SEQ ID NOs: 821 and 825, (cxii) SEQ ID NOs: 821 and 826, (cxiii) SEQ ID NOs: 821 and 827, (cxiv) SEQ ID NOs: 821 and 828, (cxv) SEQ ID NOs: 822 and 824, (cxvi) SEQ ID NOs: 822 and 825, (cxvii) SEQ ID NOs: 822 and 826, (cxviii) SEQ ID NOs: 822 and 827, (cxix) SEQ ID NOs: 822 and 828, (cxx) SEQ ID NOs: 823 and 824, (cxxi) SEQ ID NOs: 823 and 825, (cxxii) SEQ ID NOs: 823 and 826, (cxxiii) SEQ ID NOs: 823 and 827, (cxxiv) SEQ ID NOs: 823 and 828, and (cxxv) SEQ ID NOs: 829 and 830, as shown in FIGS. 22A-22R, as well as those disclosed herein. Additionally, any sequence included above from FIG. 22 can also be individually included or excluded. It should be noted that these ABDs can be included in any of the formats described herein.

[0205] An anti-human Trop-2 antigen binding domain with VH and VL sequences selected from the group including: a) a VH having the amino acid sequence of positions 20 to 140 of SEQ ID NO:12 and a VL having the amino acid sequence of positions 21 to 129 of SEQ ID NO:18; b) a VH having the amino acid sequence of positions 20 to 140 of SEQ ID NO:14 and a VL having the amino acid sequence of positions 21 to 129 of SEQ ID NO:18; c) a VH having the amino acid sequence of positions 20 to 140 of SEQ ID NO: 14 and a VL having the amino acid sequence of positions 21 to 129 of SEQ ID NO:20; d) a VH having the amino acid sequence of positions 20 to 140 of SEQ ID NO:16 and a VL having the amino acid sequence of positions 21 to 129 of SEQ ID NO:22; wherein the sequences are as shown in U.S. Pat. No. 9,850,312, hereby expressly incorporated by reference for the sequences. Additionally, any sequence included above from U.S. Pat. No. 9,850,312 can also be individually included or excluded.

[0206] An anti-human Trop-2 antigen binding domain with VH and VL sequences selected from the group including: a) a VH having the amino acid sequence of SEQ ID NO: 172 and a VL having the amino acid sequence of SEQ ID NO:173; b) a VH having the amino acid sequence of SEQ ID NO:180 and a VL having the amino acid sequence of SEQ ID NO: 181; c) a VH having the amino acid sequence of SEQ ID NO:188 and a VL having the amino acid sequence of SEQ ID NO: 189; d) a VH having the amino acid sequence of SEQ ID NO:190 and a VL having the amino acid sequence of SEQ ID NO:191; and e) a VH having the amino acid sequence of SEQ ID NO:192 and a VL having the amino acid sequence of SEQ ID NO:193; wherein the sequences are as shown in Table 5 of WO2018/157147 hereby expressly incorporated by reference for the sequences. Additionally, any sequence included above from Table 5 of WO2018/157147 can also be individually included or excluded.

[0207] In some embodiments, the NKEs of the invention include at least one anti-Trop2 antigen binding domain, as described herein and in the Figures. Described herein is plurality of a means for binding the ECD of human Trop2.

[0208] 11. CEA Antigen Binding Domains

[0209] In some embodiments, the NKEs include an ABD that binds to the ECD of human CEA. Suitable variable heavy VH and variable light VL domains that bind to the ECD of human CEA include, but are not limited to, VH/VL pairs selected from the group including: (i) SEQ ID NOs: 239 and 240, (ii) SEQ ID NOs: 241 and 242, (iii) SEQ ID NOs: 243 and 244, (iv) SEQ ID NOs: 245 and 246, (v) SEQ ID NOs: 247 and 248, (vi) SEQ ID NOs: 249 and 250, (vii) SEQ ID NOs: 251 and 252, (viii) SEQ ID NOs: 253 and 254, (ix) SEQ ID NOs: 255 and 256, (x) SEQ ID NOs: 257 and 258, (xi) SEQ ID NOs: 259 and 260, (xii) SEQ ID NOs: 261 and 262, (xiii) SEQ ID NOs: 263 and 264, and (xiv) SEQ ID NOs: 265 and 266, as shown in FIGS. 18A-18C, as well as those disclosed herein. Additionally, any sequence included above from FIG. 18 can also be individually included or excluded. It should be noted that these ABDs can be included in any of the formats described herein.

[0210] An anti-human CEA antigen binding domain with sequences selected from the group including: a) a VH with the amino acid sequence shown in SEQ ID NO:195 and a VL with the amino acid sequence shown in SEQ ID NO:196; b) a VH with the amino acid sequence shown in SEQ ID NO:203 and a VL with the amino acid sequence shown in SEQ ID NO:204; and c) a VH with the amino acid sequence shown in SEQ ID NO:211 and a VL with the amino acid sequence shown in SEQ ID NO:212; wherein the sequences are as shown in Table 6 WO2018/157147, hereby expressly incorporated by reference for the sequences. Additionally, any sequence included above from Table 6 of WO2018/157147 can also be individually included or excluded.

[0211] In some embodiments, the NKEs of the invention include at least one anti-CEA antigen binding domain, as described herein and in the Figures. Described herein is a plurality of means for binding the ECD of human CEA.

[0212] 12. CLDN18.2 Antigen Binding Domains

[0213] In some embodiments, the NKEs include an ABD that binds to the ECD of human CLDN18.2. Suitable variable heavy VH and variable light VL domains that bind to the ECD of human CLDN18.2 include, but are not limited to, VH/VL pairs selected from the group including: (i) SEQ ID NOs: 226 and 229, (ii) SEQ ID NOs: 226 and 230, (iii) SEQ ID NOs: 227 and 229, (iv) SEQ ID NOs: 227 and 230, (v) SEQ ID NOs: 228 and 229, (vi) SEQ ID NOs: 228 and 230, and (vii) SEQ ID NOs: 231 and 232, as shown in FIG. 16, as well as those disclosed herein. Additionally, any sequence included above from FIG. 16 can also be individually included or excluded. It should be noted that these ABDs can be included in any of the formats described herein.

[0214] An anti-human CLDN18.2 antigen binding domain comprising a variable heavy domain and a variable light domain selected from the group including: a) a V_{H} with the amino acid sequence depicted in SEQ ID NO:220 and a VL with the amino acid sequence depicted in SEQ ID NO:221; and b) a VL with the amino acid sequence depicted in SEQ ID NO:228 and a VL with the amino acid sequence depicted in SEQ ID NO:229, wherein the sequences are as depicted in WO2018/157147, hereby incorporated by reference for the sequences.

[0215] In some embodiments, the NKEs of the invention include at least one anti-CLDN18.2 antigen binding domain, as described herein and in the Figures. Described herein is a plurality of means for binding the ECD of human CLDN18.2.

[0216] 13. BCMA Antigen Binding Domains

[0217] In some embodiments, the NKEs include an ABD that binds to the ECD of human BCMA. Suitable variable heavy VH and variable light VL domains that bind to the ECD of human BCMA include, but are not limited to, VH/VL pairs selected from the group including: (i) SEQ ID NOs: 233 and 234, (ii) SEQ ID NOs: 235 and 236, (iii) SEQ ID NOs: 237 and 238, (iv) SEQ ID NOs: 12 and 16, (v) SEQ ID NOs: 22 and 26, (vi) SEQ ID NOs: 32 and 36, (vii) SEQ ID NOs: 42 and 46, (viii) SEQ ID NOs: 52 and 56, (ix) SEQ ID NOs: 62 and 66, and (x) SEQ ID NOs: 72 and 76, as shown in FIGS. 17A-17C, as well as those disclosed herein. Additionally, any sequence included above from FIG. 17 can also be individually included or excluded. It should be noted that these ABDs can be included in any of the formats described herein.

[0218] Provided herein is an anti-human BCMA antigen binding domain having a VH with the amino acid sequence depicted in SEQ ID NO:65 and a VL with the amino acid sequence depicted in SEQ ID NO: 66, wherein the sequences as are depicted in WO2019/198501, hereby incorporated by reference for these sequences. Additionally, any sequence included above from WO2019/198501 can also be individually included or excluded.

[0219] Also provided herein, is an anti-BCMA antigen binding domain having a variable heavy and a variable light domain with amino acid sequences selected from the sets comprising: a) a VH with SEQ ID NO:1118 and a VL with SEQ ID NO:1119; b) a VH with SEQ ID NO:1123 and a VL with SEQ ID NO:1124; c) a VH with SEQ ID NO: 1127 and a VL with SEQ ID NO:1128; d) a VH with SEQ ID NO:1131 and a VL with SEQ ID NO:1132; e) a VH with SEQ ID NO:1153 and a VL with SEQ ID NO:1154; f) a VH with SEQ ID NO:79 and a VL with SEQ ID NO:94; g) a VH with SEQ ID NO:69 and a VL with SEQ ID NO:84; h) a VH with SEQ ID NO:70 and a VL with SEQ ID NO:85; i) a VH with SEQ ID NO:71 and a VL with SEQ ID NO:86; j) a VH with SEQ ID NO:72 and a VL with SEQ ID NO:87; k) a VH with SEQ ID NO:73 and a VL with SEQ ID NO:88; l) a VH with SEQ ID NO:74 and a VL with SEQ ID NO:89; m) a VH with SEQ ID NO:75 and a VL with SEQ ID NO:90; n) a VH with SEQ ID NO:76 and a VL with SEQ ID NO:91; o) a VH with SEQ ID N077: and a VL with SEQ ID NO:92; p) a VH with SEQ ID NO:78 and a VL with SEQ ID NO:93; q) a VH with SEQ ID NO:80 and a VL with SEQ ID NO:95; r) a VH with SEQ ID NO:81 and a VL with SEQ ID NO:96; s) a VH with SEQ ID NO:82 and a VL with SEQ ID NO:97; t) a VH with SEQ ID NO:83 and a VL with SEQ ID NO:98; u) a VH with SEQ ID NO:171 and a VL with SEQ ID NO:192; v) a VH with SEQ ID NO:172 and a VL with SEQ ID NO:193; w) a VH with SEQ ID NO: 173 and a VL with SEQ ID NO:194; x) a VH with SEQ ID NO:174 and a VL with SEQ ID NO:195; y) a VH with SEQ ID NO:175 and a VL with SEQ ID NO:196; z) a VH with SEQ ID NO:176 and a VL with SEQ ID NO:197; aa) a VH with SEQ ID NO:177 and a VL with SEQ ID NO:198; bb) a VH with SEQ ID NO:178 and a VL with SEQ ID NO:199; cc) a VH with SEQ ID NO:179 and a VL with SEQ ID NO:200; dd) a VH with SEQ ID NO:180 and a VL with SEQ ID NO:201; ee) a VH with SEQ ID NO:181 and a VL with SEQ ID NO:202; ff) a VH with SEQ ID NO:182 and a VL with SEQ ID NO:203; gg) a VH with SEQ ID NO:183 and a VL with SEQ ID NO:204; hh) a VH with SEQ ID NO:184 and a VL with SEQ ID NO:205; ii) a VH with SEQ ID NO:185 and a VL with SEQ ID NO:206; jj) a VH with SEQ ID NO:186 and a VL with SEQ ID NO:207; kk) a VH with SEQ ID NO:187 and a VL with SEQ ID NO:208; ll) a VH with SEQ ID NO:188 and a VL with SEQ ID NO:209; mm) a VH with SEQ ID NO:189 and a VL with SEQ ID NO:210; nn) a VH with SEQ ID NO:190 and a VL with SEQ ID NO:211; and oo) a VH with SEQ ID NO:191 and a VL with SEQ ID NO:212; wherein the sequences as are depicted in US2020/0179511, hereby incorporated by reference for these sequences. Additionally, any sequence included above from US2020/0179511 can also be individually included or excluded.

[0220] In some embodiments, the NKEs of the invention include at least one anti-BCMA antigen binding domain, as described herein and in the Figures. Described herein is a plurality of means for binding the ECD of human BCMA.

[0221] 14. DLL3 Antigen Binding Domains

[0222] In some embodiments, the NKEs include an ABD that binds to the ECD of human DLL3. Suitable variable heavy VH and variable light VL domains that bind to the ECD of human DLL3 include, but are not limited to, VH/VL pairs selected from the group including: (i) SEQ ID NOs: 837 and 838, (ii) SEQ ID NOs: 839 and 840, (iii) SEQ ID NOs: 841 and 842, (iv) SEQ ID NOs: 843 and 844, (v) SEQ ID NOs: 845 and 846, (vi) SEQ ID NOs: 847 and 848, (vii) SEQ ID NOs: 849 and 850, (viii) SEQ ID NOs: 851 and 852, (ix) SEQ ID NOs: 853 and 854, (x) SEQ ID NOs: 855 and 856, (xi) SEQ ID NOs: 857 and 858, (xii) SEQ ID NOs: 859 and 860, (xiii) SEQ ID NOs: 861 and 862, (xiv) SEQ ID NOs: 863 and 864, (xv) SEQ ID NOs: 865 and 866, (xvi) SEQ ID NOs: 867 and 868, and (xvii) SEQ ID NOs: 869 and 870, as shown in FIGS. 24A-24C, as well as those disclosed herein. Additionally, any sequence included above from FIG. 24 can also be individually included or excluded. It should be noted that these ABDs can be included in any of the formats described herein.

[0223] Provided herein is an anti-human DLL3 antigen binding domain with sequences selected from the group including: (a) a VH with the amino acid sequence shown in SEQ ID NO:38 and a VL with the amino acid sequence shown in SEQ ID NO:37; (b) a VH with the amino acid sequence shown in SEQ ID NO:40 and a VL with the amino acid sequence shown in SEQ ID NO:39; (c) a VH with the amino acid sequence shown in SEQ ID NO:42 and a VL with the amino acid sequence shown in SEQ ID NO:41; (d) a VH with the amino acid sequence shown in SEQ ID NO:44 and a VL with the amino acid sequence shown in SEQ ID NO:43; (e) a VH with the amino acid sequence shown in SEQ ID NO:46 and a VL with the amino acid sequence shown in SEQ ID NO:45; (f) a VH with the amino acid sequence shown in SEQ ID NO:48 and a VL with the amino acid sequence shown in SEQ ID NO:47; (g) a VH with the amino acid sequence shown in SEQ ID NO:206 and a VL with the amino acid sequence shown in SEQ ID NO:205; (h) a VH with the amino acid sequence shown in SEQ ID NO:208 and a VL with the amino acid sequence shown in SEQ ID NO:207; (i) a VH with the amino acid sequence shown in SEQ ID N0210: and a VL with the amino acid sequence shown in SEQ ID NO:209; (j) a VH with the amino acid sequence shown in SEQ ID NO:212 and a VL with the amino acid sequence shown in SEQ ID NO:211; (k) a VH with the amino acid sequence shown in SEQ ID NO:214 and a VL with the amino acid sequence shown in SEQ ID NO:213; (1) a VH with the amino acid sequence shown in SEQ ID NO:216 and a VL with the amino acid sequence shown in SEQ ID NO:215; (m) a VH with the amino acid sequence shown in SEQ ID NO:218 and a VL with the amino acid sequence shown in SEQ ID NO:217; (n) a VH with the amino acid sequence shown in SEQ ID NO:220 and a VL with the amino acid sequence shown in SEQ ID NO:219; (o) a VH with the amino acid sequence shown in SEQ ID NO:222 and a VL with the amino acid sequence shown in SEQ ID NO:221; (p) a VH with the amino acid sequence shown in SEQ ID NO:224 and a VL with the amino acid sequence shown in SEQ ID NO:223; (q) a VH with the amino acid sequence shown in SEQ ID NO:226 and a VL with the amino acid sequence shown in SEQ ID NO:225; and (r) a VH with the amino acid sequence shown in SEQ ID NO:208 and a VL with the amino acid sequence shown in SEQ ID NO:227; wherein the sequences are as shown in WO2019/234220, hereby expressly incorporated by reference for the sequences. Additionally, any sequence included above from WO2019/234220 can also be individually included or excluded.

[0224] Provided herein is anti-human DLL3 antigen binding domain with sequences selected from the group including: (a) a VH with the amino acid sequence shown in SEQ ID NO:232 and a VL with the amino acid sequence shown in SEQ ID NO:236; (b) a VH with the amino acid sequence shown in SEQ ID NO:264 and a VL with the amino acid sequence shown in SEQ ID NO:265; (c) a VH with the amino acid sequence shown in SEQ ID NO:266 and a VL with the amino acid sequence shown in SEQ ID NO:267; and (d) a VH with the amino acid sequence shown in SEQ ID NO:268 and a VL with the amino acid sequence shown in SEQ ID NO:269; wherein the sequences are as shown in WO2021/200898, hereby expressly incorporated by reference for the sequences. Additionally, any sequence included above from WO2021/200898 can also be individually included or excluded.

[0225] In some embodiments, the NKEs of the invention include at least one anti-DLL3 antigen binding domain, as described herein and in the Figures. Described herein is a plurality of means for binding the ECD of human DLL3.

[0226] 15. PD-1 Antigen Binding Domains

[0227] In some embodiments, the NKEs include an ABD that binds to the ECD of human PD-1. Suitable variable heavy VH and variable light VL domains that bind to the ECD of human PD-1 include, but are not limited to, VH/VL pairs selected from the group including: (i) SEQ ID NOs: 871 and 872, (ii) SEQ ID NOs: 873 and 874, (iii) SEQ ID NOs: 875 and 876, (iv) SEQ ID NOs: 877 and 878, (v) SEQ ID NOs: 879 and 880, (vi) SEQ ID NOs: 881 and 882, (vii) SEQ ID NOs: 883 and 884, (viii) SEQ ID NOs: 885 and 886, (ix) SEQ ID NOs: 887 and 888, (x) SEQ ID NOs: 889 and 890, (xi) SEQ ID NOs: 891 and 892, (xii) SEQ ID NOs: 893 and 894, (xiii) SEQ ID NOs: 895 and 896, (xiv) SEQ ID NOs: 897 and 898, (xv) SEQ ID NOs: 899 and 900, (xvi) SEQ ID NOs: 901 and 902, (xvii) SEQ ID NOs: 903 and 904, (xviii) SEQ ID NOs: 905 and 906, (xix) SEQ ID NOs: 907 and 908, and (xx) SEQ ID NOs: 909 and 910, as shown in FIGS. 25A-25G, as well as those disclosed herein. Additionally, any sequence included above from FIG. 25 can also be individually included or excluded. It should be noted that these ABDs can be included in any of the formats described herein.

[0228] In some embodiments, the NKEs of the invention include at least one anti-PD-1 antigen binding domain, as described herein and in the Figures. Described herein is a plurality of means for binding the ECD of human PD-1.

[0229] 16. ANO1 Antigen Binding Domains

[0230] In some embodiments, the TTA binds to the ECD of human ANO1. In this case, the amino acid sequence of the variable heavy domain is shown in SEQ ID NO:97 of Table 3 of WO2018/157147 and the sequence of the variable light domain is shown in SEQ ID NO:98, the sequences of which are hereby incorporated by reference.

[0231] In some embodiments, the NKEs of the invention include at least one anti-ANO1 antigen binding domain, as described herein and in the Figures. Described herein is a means for binding the ECD of human ANO1 antigen.

[0232] 17. CD22 Antigen Binding Domains

[0233] In some embodiments, the TTA binds to the ECD of human CD22. In some embodiments, the amino acid sequence of the variable heavy domain is shown in SEQ ID NO:30 and the variable light domain is shown in SEQ ID NO:28 of U.S. Pat. No. 7,355,011, the sequences of which are hereby incorporated by reference. In some embodiments, the CD22 ABD comprises the variable heavy and variable light domains of an antibody selected from the group including epratuzumab or moxetumomab.

[0234] In some embodiments, the NKEs of the invention include at least one anti-CD22 antigen binding domain, as described herein and in the Figures. Described herein is a means for binding the ECD of human CD22 antigen.

[0235] 18. CD38 Antigen Binding Domains

[0236] In some embodiments, the TTA binds to the ECD of human CD38. In some embodiments, the CD22 ABD comprises the variable heavy and variable light domains of an antibody selected from the group including daratumumab, isatuximab, felzartamab, or mezagitamab.

[0237] In some embodiments, the NKEs of the invention include at least one anti-CD38 antigen binding domain, as described herein and in the Figures. Described herein is a means for binding the ECD of human CD38 antigen.

[0238] C. Linkers

[0239] As shown herein, there are a number of suitable linkers (for use as either domain linkers or scFv linkers) that can be used to covalently attach the recited domains (e.g., scFvs, Fabs, Fc domains, etc.), including traditional peptide bonds, generated by recombinant techniques. Exemplary linkers to attach domains of the subject antibody to each other are depicted in FIGS. 5-7 (see, e.g., SEQ ID NOs: 1-11, 20, 21, 30, 31, 40, 41, 50, 51, 81-92, 94-120). In some embodiments, the linker peptide may predominantly include the following amino acid residues: Gly, Ser, Ala, or Thr. The linker peptide should have a length that is adequate to link two molecules in such a way that they assume the correct conformation relative to one another so that they retain the desired activity. In one embodiment, the linker is from about 1 to 50 amino acids in length, preferably about 1 to 30 amino acids in length. In one embodiment, linkers of 1 to 20 amino acids in length may be used, with from about 5 to about 10 amino acids finding use in some embodiments. Useful linkers include glycine-serine polymers, including for example (GS)n (SEQ ID NO: 120), (GSGGS)n (SEQ ID NO: 117), (GGGGS)n (SEQ ID NO: 118), and (GGGS)n (SEQ ID NO: 119), where n is an integer of at least one up to 10 (and generally from 3 to 4), glycine-alanine polymers, alanine-serine polymers, and other flexible linkers, some of which are shown in the Figures. Alternatively, a variety of nonproteinaceous polymers, including but not limited to polyethylene glycol (PEG), polypropylene glycol, polyoxyalkylenes, or copolymers of polyethylene glycol and polypropylene glycol, may find use as linkers.

[0240] Other linker sequences may include any sequence of any length of C_{L}/CH1 domain but not all residues of C_{L}/CH1 domain; for example, the first 5-12 amino acid residues of the C_{L}/CH1 domains. Linkers can be derived from immunoglobulin light chain, for example Cκ or Cλ. Linkers can be derived from immunoglobulin heavy chains of any isotype, including for example Cγ1, Cγ2, Cγ3, Cγ4, Cα1, Cα2, Cδ, Cε, and Cμ. Linker sequences may also be derived from other proteins such as Ig-like proteins (e.g., TCR, FcR, KIR), hinge region-derived sequences, and other natural sequences from other proteins.

[0241] In some embodiments, the linker is a “domain linker,” used to link any two domains as outlined herein together. For example, there may be a domain linker that attaches the C-terminus of the CH1 domain of the Fab to the N-terminus of the scFv, with another optional domain linker attaching the C-terminus of the scFv to the CH2 domain (although in many embodiments the hinge is used as this domain linker) (as are generally shown in the Figures). While any suitable linker can be used, many embodiments utilize a glycine-serine polymer as the domain linker, including for example (GS)n (SEQ ID NO: 120), (GSGGS)n (SEQ ID NO: 117), (GGGGS)n (SEQ ID NO: 118), and (GGGS)n (SEQ ID NO: 119), where n is an integer of at least one up to 10 (and generally from 3 to 4) as well as any peptide sequence that allows for recombinant attachment of the two domains with sufficient length and flexibility to allow each domain to retain its biological function. In some cases, and with attention being paid to “strandedness,” as outlined below, charged domain linkers, as used in some embodiments of scFv linkers can be used. Exemplary useful domain linkers are depicted in FIGS. 5-7 (see, e.g., SEQ ID NOs: 1-11, 20, 21, 30, 31, 40, 41, 50, 51, 81-92, 94-120).

[0242] With particular reference to the domain linker used to attach the scFv domain to the Fc domain in the “2+1” format, there are several domain linkers that find particular use, including “full hinge C220S variant,” “flex half hinge,” “charged half hinge 1,” and “charged half hinge 2” as shown in FIG. 6 (see, e.g., SEQ ID NOs: 50, 51, and 111-116).

[0243] In some embodiments, the linker is a “scFv linker,” used to covalently attach the V_{H} and V_{L} domains as discussed herein. In many cases, the scFv linker is a charged scFv linker, a number of which are shown in FIG. 5 (see, e.g., SEQ ID NOs: 1-11, 20, 21, and 81-92). Accordingly, in some embodiments, the antibodies described herein further provide charged scFv linkers, to facilitate the separation in pI between a first and a second monomer. That is, by incorporating a charged scFv linker, either positive or negative (or both, in the case of scaffolds that use scFvs on different monomers), this allows the monomer comprising the charged linker to alter the pI without making further changes in the Fc domains. These charged linkers can be substituted into any scFv containing standard linkers. Again, as will be appreciated by those in the art, charged scFv linkers are used on the correct “strand” or monomer, according to the desired changes in pI. For example, as discussed herein, to make 1+1 Fab-scFv-Fc format heterodimeric antibody, the original pI of the Fv region for each of the desired antigen binding domains are calculated, and one is chosen to make an scFv, and depending on the pI, either positive or negative linkers are chosen.

[0244] Charged domain linkers can also be used to increase the pI separation of the monomers of the antibodies described herein as well, and thus those included in the Figures can be used in any embodiment herein where a linker is utilized.

### VI. Antibodies

[0245] The antibodies provided herein include different antibody domains as is more fully described below. As described herein and known in the art, the antibodies described herein include different domains within the heavy and light chains, which can be overlapping as well. These domains include, but are not limited to, the Fc domain, the CH1 domain, the CH2 domain, the CH3 domain, the hinge domain, the heavy constant domain (CH1-hinge-Fc domain or CH1-hinge-CH2-CH3), the variable heavy domain, the variable light domain, the light constant domain, Fab domains and scFv domains. It should be noted that the term “Fc domain” includes both the CH2-CH3 (and optionally the hinge, hinge-CH2-CH3) of a single monomer, as well as the dimer of two Fc domains that self-assemble. That is, the heavy chain of an antibody has an Fc domain that is a single polypeptide, while the assembled bispecific antibody has an Fc domain that contains two polypeptides. Various antibody domains included in the bispecific, heterodimeric antibodies are more fully described below.

[0246] In particular, the formats depicted in FIG. 8 are usually referred to as “heterodimeric antibodies,” meaning that the protein has at least two associated Fc sequences self-assembled into a heterodimeric Fc domain and at least two Fv regions, whether as Fabs or as scFvs.

[0247] A. Chimeric and Humanized Antibodies

[0248] In certain embodiments, the antibodies described herein comprise a heavy chain variable region from a particular germline heavy chain immunoglobulin gene and/or a light chain variable region from a particular germline light chain immunoglobulin gene. For example, such antibodies may comprise or consist of a human antibody comprising heavy or light chain variable regions that are “the product of” or “derived from” a particular germline sequence. A human antibody that is “the product of” or “derived from” a human germline immunoglobulin sequence can be identified as such by comparing the amino acid sequence of the human antibody to the amino acid sequences of human germline immunoglobulins and selecting the human germline immunoglobulin sequence that is closest in sequence (i.e., greatest % identity) to the sequence of the human antibody (using the methods outlined herein). A human antibody that is “the product of” or “derived from” a particular human germline immunoglobulin sequence may contain amino acid differences as compared to the germline sequence, due to, for example, naturally occurring somatic mutations or intentional introduction of site-directed mutation. However, a humanized antibody typically is at least 90% identical in amino acids sequence to an amino acid sequence encoded by a human germline immunoglobulin gene and contains amino acid residues that identify the antibody as being derived from human sequences when compared to the germline immunoglobulin amino acid sequences of other species (e.g., murine germline sequences). In certain cases, a humanized antibody may be at least 95, 96, 97, 98 or 99%, or even at least 96%, 97%, 98%, or 99% identical in amino acid sequence to the amino acid sequence encoded by the germline immunoglobulin gene. Typically, a humanized antibody derived from a particular human germline sequence will display no more than 10-20 amino acid differences from the amino acid sequence encoded by the human germline immunoglobulin gene (prior to the introduction of any skew, pI, and ablation variants herein; that is, the number of variants is generally low, prior to the introduction of the variants described herein). In certain cases, the humanized antibody may display no more than 5, or even no more than 4, 3, 2, or 1 amino acid difference from the amino acid sequence encoded by the germline immunoglobulin gene (again, prior to the introduction of any skew, pI, and ablation variants herein; that is, the number of variants is generally low, prior to the introduction of the variants described herein). In some embodiments, the amino acid differences are in one or more of the 6 CDRs. In some embodiments, the amino acid differences are in a V_{H} and/or V_{L} framework region.

[0249] In one embodiment, the parent antibody has been affinity matured, as is known in the art. Structure-based methods may be employed for humanization and affinity maturation, for example as described in U.S. Ser. No. 11/004,590. Selection based methods may be employed to humanize and/or affinity mature antibody variable regions, including but not limited to methods described in Wu et al., 1999, J. Mol. Biol. 294:151-162; Baca et al., 1997, J. Biol. Chem. 272(16):10678-10684; Rosok et al., 1996, J. Biol. Chem. 271(37): 22611-22618; Rader et al., 1998, Proc. Natl. Acad. Sci. USA 95: 8910-8915; Krauss et al., 2003, Protein Engineering 16(10):753-759, all entirely incorporated by reference. Other humanization methods may involve the grafting of only parts of the CDRs, including but not limited to methods described in U.S. Ser. No. 09/810,510; Tan et al., 2002, J. Immunol. 169:1119-1125; De Pascalis et al., 2002, J. Immunol. 169:3076-3084, all entirely incorporated by reference.

[0250] B. Heterodimeric Antibodies as Natural Killer Cell Engagers

[0251] In one aspect, provided herein are Natural Killer cell Engager (NKE). Generally, NKEs are multifunctional molecules that target activating or inhibitory receptors (in particular the ECD of such receptors) expressed on the surface of NK cells, optionally bind to tumor target antigens (in particular the ECD of such antigens) and activate Fc gamma receptors expressed on effector cells of a subject's immune system. The different domains of an NKE including the NK cell antigen binding domain, the tumor target antigen binding domain and the Fc domains can modulate its activity and function.

[0252] Described below are useful variant Fc domains that include amino acid modifications (i.e., substitutions, insertions, or deletions) to enhance FcγR-mediated cytotoxicity, increase serum half-life, and facilitate the self-assembly and/or purification of the heterodimeric antibodies provided. Also, exemplary antibodies, including multispecific antibodies, that bind to NK cells can include such variant Fc domains described below and set forth in the figures.

[0253] 1. Fc Domain Variants for Increasing Antibody-Dependent Cellular Cytotoxicity (ADCC)

[0254] There are a number of useful Fc substitutions that can be made to alter binding to one or more of the FcγR receptors. Substitutions that result in increased binding (or in some cases, decreased binding) can be useful. For example, it is known that increased binding to FcγRIIIa can result in increased ADCC (antibody dependent cell-mediated cytotoxicity). In some instances, decreased binding to FcγRIIb (an inhibitory receptor) can be beneficial as well. Amino acid substitutions that find use in the present invention include those listed in U.S. Ser. No. 11/124,620 (particularly FIG. 41), U.S. Ser. Nos. 11/174,287, 11/396,495, 11/538,406, all of which are expressly incorporated herein by reference in their entirety and specifically for the variants disclosed therein.

[0255] In some embodiments, provided herein are bispecific antibodies containing Fc variants that increase antibody-dependent cellular cytotoxicity (ADCC; the cell-mediated reaction wherein nonspecific cytotoxic cells that express FcγRs recognize bound antibody on a target cell and subsequently cause lysis of the target cell) activity of the antibodies. In other words, the heterodimeric antibodies encompassed by the disclosure herein include amino acid substitutions in each or both of the Fc domains of a parental sequence, usually IgG1, that can enhance ADCC.

[0256] In some embodiments, the Fc ADCC variants (e.g., ADCC-enhanced Fc variants) comprise amino acid substitution(s) selected from the group including: S239D, S239E, I332D, I332E, S239D/I332E, S239E/I332E, S239D/I332D, S239E/I332D, S239D/A330L/I332E, S239D/A330L, A330L/I332E, F243L, F243L/R292P/Y300L/V305I/P396L, I332E/P247I/A339Q, S298A/E333A, S298A/E333A/K334A, V264I/I332E, S298A, S298A/I332E, S239Q/I332E, D265G, Y296Q, S298T, L328I/I332E, V264T, V266I, S239D/I332N, S239E/I332N, S239E/I332Q, S239N/I332E, S239Q/I332D, K326E, A330Y/I332E, V264I/A330Y/I332E, A330L/I332E, V264I/A330L/I332E, L234D, L234E, L234I, L235D, L235T, A330F, L328V/I332E, S239Q/V264I/I332E, S239E/V264I/A330Y/I332E, K274R, N276Y, S324T, K334I, K334F, L234I/L235D, L235D/S239D/A330Y/I332E, S239D/V240I/A330Y/I332E, S239D/V264T/A330Y/I332E, S239D/K326E/A330Y/I332E, S239D/K326T/A330Y/I332E, E298R, S324G, E272R, P227G, G236S, D221K, H224E, K246H, D249Y, R255Y, E258H, T260H, G281D, E283H, E283L, V284E, S239D/3272I/I332E, S239D/E272Y/A330L/I332E, S239D/E272I/A330L/I332E, S239D/K274E/I332E, S239D/K326T/I332E, S239D/K326E/I332E and S239D/K274E/A330L/I332E, according to EU numbering. In some embodiments, the amino acid substitution(s) present in an Fc ADCC variants are selected from the group including: S239D, S239E, I332D, I332E, S239D/I332E, S239E/I332E, S239D/I332D, S239E/I332D, S239D/A330L/I332E, S239D/A330L, A330L/I332E, S239D/I332N, S239N/I332D, A330Y/I332E, A330L/I332E, L328V/I332E, L328T/I332E, S239Q/V264I/I332E, S239E/V264I/A330Y/I332E, L235D/S239D/A330Y/I332E, S239D/V240I/A330Y/I332E, S239D/V264T/A330Y/I332E, S239D/K326E/A330Y/I32E, S234D/K326T/A330Y/I332E, E274R, P227G, G236S, D221K, H224E, K246H, D249Y, R255Y, E258H, E258Y, T260H, E283H, E283L, V284E, S239D/3272I/I332E, S239D/E272Y/A330L/I332E, S239D/E272I/A330L/I332E, S239D/K274E/I332E, S239D/K326T/I332E, S239D/K326E/I332E and S239D/K274E/A330L/I332E, according to EU numbering.

[0257] In some embodiments, a first Fc domain and/or a second Fc domain of the bispecific antibody provided comprise an Fc ADCC variant selected from the group including: S239D, S239E, I332D, I332E, S239D/I332E, S239E/I332E, S239D/I332D, S239E/I332D, S239D/A330L/I332E, S239D/A330L, A330L/I332E, S239D/I332N, S239N/I332D, A330Y/I332E, A330L/I332E, L328V/I332E, L328T/I332E, S239Q/V264I/I332E, S239E/V264I/A330Y/I332E, L235D/S239D/A330Y/I332E, S239D/V240I/A330Y/I332E, S239D/V264T/A330Y/I332E, S239D/K326E/A330Y/I32E, S234D/K326T/A330Y/I332E, E274R, P227G, G236S, D221K, H224E, K246H, D249Y, R255Y, E258H, E258Y, T260H, E283H, E283L, V284E, S239D/3272I/I332E, S239D/E272Y/A330L/I332E, S239D/E272I/A330L/I332E, S239D/K274E/I332E, S239D/K326T/I332E, S239D/K326E/I332E and S239D/K274E/A330L/I332E, according to EU numbering.

[0258] In some embodiments, one or more of these variants can be included either in both of the Fe domains or in only one of the Fc domains of a heterodimeric antibody. In some embodiments, an anti-B7H3×anti-NKG2D bispecific antibody described includes ADCC-enhanced variants which includes one or more amino acid modifications in a first Fc domain and/or a second Fc domain, in other words, in the Fc domain of a first monomer, in the Fc domain of a second monomer, or in the Fc domains of both monomers. In some instances, a first Fc domain includes an Fc ADCC variant, and a second Fc domain does not include an Fc ADCC variant, resulting in an asymmetrical distribution of Fc ADCC variants. In other instances, a first Fc domain includes an Fc ADCC variant, and a second Fc domain includes an Fc ADCC variant. In one embodiment, the Fc ADCC variant of the first and second Fc domains can be the same amino acid substitution. Also, in one embodiment, the Fc ADCC variant of the first and second Fc domains can be different amino acid substitution.

[0259] In some embodiments, the Fc ADCC variants described bind with greater affinity to the FcγRIIIa (CD16A) human receptor. In some embodiments, the Fc variants have affinity for FcγRIIIa (CD16A) that is at least 1-fold, 5-fold, 10-fold, 100-fold, 200-fold, or 300-fold greater than that of the parental Fc domain.

[0260] In some embodiments, the Fc ADCC variants described can mediate effector function more effectively in the presence of effector cells. In some embodiments, the Fc variants mediate ADCC that is greater than that mediated by the parental Fc domain. In certain embodiments, the Fc variants mediate ADCC that is at least 5-fold, 10-fold, 20-fold, 30-fold, 40-fold, or 50-fold greater than that mediated by the parental Fc domain.

[0261] Additional detailed descriptions of Fc variants that may enhance ADCC are provided in WO2004/029207, which is expressly incorporated herein by reference in its entirety and specifically for the variants disclosed therein.

[0262] i. Fc v90 Variants

[0263] In some embodiments, an Fc domain with enhanced binding to human FcγRIIIa (CD16A) and thus increased ADCC activity (“an Fc ADCC variant”) utilizes the amino acid substitutions S239D/I332E (sometimes referred to as the “v90 variants”) in the CH2 domain of one or both of the monomeric Fc domains, according to EU numbering. In some embodiments, a bispecific antibody described herein comprises the Fc v90 variants (e.g., amino acid substitutions S239D/I332E) in both Fc domains. In some embodiments, a bispecific antibody described herein comprises the Fc v90 variants in only one of the monomeric Fc domains. In some embodiments, the antibody comprises the Fc v90 variants in one of the monomeric Fc domains and lacks the Fc v90 variants in another Fc domain. In some embodiments, the antibody comprises the Fc v90 variants in an Fc domain and an amino acid substitution S239D in the CH2 domain of another Fc domain, according to EU numbering. In certain embodiments, the antibody comprises the Fc v90 variants in an Fc domain and an amino acid substitution I332E in the CH2 domain of another Fc domain, according to EU numbering. In some embodiments, the antibody comprises the Fc v90 variants in an Fc domain and lacks an amino acid substitution selected from S239D, I332E and S239D/I332E in the CH2 domain of another Fc domain, according to EU numbering. In some embodiments, one monomeric Fc domain comprises the S239D variant and the other comprises the I332E variant. In some embodiments, one monomeric Fc domain comprises the S239D variant and the other comprises no Fc ADCC variant. In some embodiments, one monomeric Fc domain comprises the I332E variant and the other comprises no Fc ADCC variant.

[0264] As will be appreciated by those in the art, in the case of these asymmetrical Fc ADCC variants, which monomer receives which variant(s) can be based on the “strandedness” outlined herein; that is, it may be useful to calculate the pI of different combinations and utilize the Fc ADCC variants such that the pIs of the two monomers are different to facilitate purification.

[0265] In some embodiments, monomer 1 comprises a first Fc v90 variants, and monomer 2 comprises the amino acid substitution S239D or I332E. In some embodiments, monomer 1 comprises the Fc V90 variants, and monomer 2 does not comprise the amino acid substitution(s) S239D, I332E or S239D/I332E. In some embodiments, at least one of the Fc domains of the bispecific antibody comprises the Fc v90 variants. A first Fc domain may comprise the Fc v90 variants, or it may comprise a parental sequence relative to the Fc v90 variants (e.g., a wild-type Fc domain, a Fc domain with one or more amino acid modifications that improves ADCC but does not include S239D, I332E or S239D/I332E substitutions, and the like). In such instances where at least one of the Fc domains comprises a parental sequence, relative to the Fc v90 variants, for the purposes of this section, this Fc domain may be referred to as a “WT Fc domain” with respect to the S239 and 1332 positions of the Fc domain. In some embodiments, the antibody described herein comprises an Fc domain having an amino acid substitution of either S239D, I332E, or S239D/I332E, and another Fc domain having an amino acid substitution of either S239D, I332E, or S239D/I332E. In some embodiments, the antibody described herein comprises an Fc domain having an amino acid substitution of either S239D, I332E, or S239D/I332E, and another Fc domain without an amino acid substitution of either S239D, I332E, or S239D/I332E.

[0266] In some embodiments, the first Fc domain and the second Fc domain contain a set of ADCC-enhanced variant substitutions (first Fc domain variant: second Fc domain variant) selected from the group including: S239: I332E; S239D: S239D; S239D: WT; S239D: S239D/I332E; S239D/I332E: WT; S239D/I332E: S239D; S239D/I332E: I332E; S239D/I332E: S239D/I332E; I332E: WT; I332E: I332E; I332E: S239D; I332E: S239D/I332E; WT: S239D; WT: I332E; WT: S239D/I332E, according to EU numbering. In some embodiments, monomer 1 and monomer 2 contain a set of ADCC-enhanced variant substitutions (monomer 1 monomer 2) selected from the group including: S239: I332E; S239D: S239D; S239D: WT; S239D: S239D/I332E; S239D/I332E: WT; S239D/I332E: S239D; S239D/I332E: I332E; S239D/I332E: S239D/I332E; I332E: WT; I332E: I332E; I332E: S239D; I332E: S239D/I332E; WT: S239D; WT: I332E; WT: S239D/I332E, according to EU numbering.

[0267] In some embodiments, Fc domains with enhanced ADCC can further comprise one or more additional modifications at one or more of the following positions, including, but not limited to, 236, 243, 298, 299, or 330 in the CH2 domain, according to EU numbering. In some embodiments, the Fc variant domains comprise an amino acid substitution including, but not limited to: 236A, 243L, 298A, 299T, or 330L in the CH2 domain, according to EU numbering.

[0268] In some embodiments, an ADCC-enhanced Fc variant further includes, but is not limited, an amino acid substitution at one or more positions of the CH2 domain, according to EU numbering selected from the group including: position 236, 243, 298, 299, and 330. In some embodiments, an ADCC-enhanced Fc variant includes an amino acid substitution selected from the group including: 236A, 243L, 298A, 299T, 330L, 239D/332E, 236A/332E, 239D/332E/330L, 332E/330L, and any combination thereof in the CH2 domain, according to EU numbering. In some embodiments, the first Fc domain and/or the second Fc domain comprises an ADCC-enhanced Fc variant including, but not limited to, an amino acid substitution selected from the group including: 236A, 243L, 298A, 299T, 330L, 239D/332E, 236A/332E, 239D/332E/330L, 332E/330L, and any combination thereof in the CH2 domain, according to EU numbering, such that the Fc ADCC variant is the same in both Fc domain. Alternatively, the Fc ADCC variant is a different variant in each of the Fc domains.

[0269] Engineered antibodies comprising such ADCC-enhanced Fc variants can also have higher-affinity FcγRIIIa binding, thus resulting in stronger ADCC activity with NK cells. Bispecific antibodies having a variant Fc domain described herein can be useful and effective for NK cell-mediated killing of tumor cells.

[0270] ii. Fc Variants to Increase Binding to FcγRIIIa/CD16A

[0271] There are additional Fc substitutions that find use in enhancing FcγRIIIa binding. In some embodiments, the Fc domains of the bispecific antibodies provided include one or more Fe domains having increased binding to FcγRIIIa as compared to human IgG1 produced in standard research and production cell lines. In some embodiments, the Fc variants with improved binding affinity to at least FcγRIIIa have amino acid substitution(s) selected from the group including: V264I/I332E, S298A, S298A/I332E, S298A/E333A/K334A, S239Q/I332E, D265G, Y296Q, S298T, L328I/I332E, V264T, V266I, S239D/I332N, S239E/I332N, S239E/I332Q, S239N/I332E, S239Q/I332D, K326E, A330Y/I332E, V264I/A330Y/I332E, A330L/I332E, V264I/A330L/I332E, L234D, L234E, L234I, L235D, L235T, A330F, L328V/I332E, S239Q/V264I/I332E, S239E/V264I/A330Y/I332E, K274R, N276Y, S324T, K334I, K334F, L234I/L235D, L235D/S239D/A330Y/I332E, S239D/V240I/A330Y/I332E, S239D/V264T/A330Y/I332E, S239D/K326E/A330Y/I332E, S239D/K326T/A330Y/I332E, E298R, S324G, E272R, P227G, G236S, D221K, H224E, K246H, D249Y, R255Y, E258H, T260H, G281D, E283H, E283L, V284E, S239D/3272I/I332E, S239D/E272Y/A330L/I332E, S239D/E272I/A330L/I332E, S239D/K274E/I332E, S239D/K326T/I332E, S239D/K326E/I332E and S239D/K274E/A330L/I332E, according to EU numbering of the Fc domain. Additional Fc variants with enhanced binding affinity, specificity and/or avidity to FcγRIIIa are disclosed the specification and FIG. 41 of U.S. Pat. No. 8,188,231.

[0272] The described bispecific antibodies contain such Fc variants that provide enhanced effector function and substantial increases in affinity for FcγRIIIa. In some embodiments, the Fc variants improve binding to FcγRIIIa allotypes such as, for example, both V158 and F158 polymorphic forms of FcγRIIIa. The FcγR binding affinities of these Fc variants can be evaluated using assay recognized by those skilled in the art including, but not limited to, a Surface Plasmon Resonance (SPR) and/or a BLI binding assay (such as Biacore, Octet, or Caterra LSA).

[0273] 2. Fc Variants for Increasing Binding to FcRn

[0274] Provided herein are additional Fc substitutions that find use in increased binding to the FcRn receptor and increased serum half-life, as specifically disclosed in U.S. Ser. No. 12/341,769, hereby incorporated by reference in its entirety, including, but not limited to, N434S, N434A, M428L, V308F, V259I, M428L/N434S, M428L/N434A, V259I/V308F, Y436I/M428L, Y436I/N434S, Y436V/N434S, Y436V/M428L, M252Y/S254T/T256E, and V259I/V308F/M428L. Such modification may be included in one or both Fc domains of the subject antibody.

[0275] In some embodiments, additional Fc variants can increase serum half-life of a bispecific antibody compared to a parental Fc domain. In some embodiments, the Fc variants have one or more amino acid modifications (i.e., substitutions, insertions or deletions) at one or more of the following amino acid residues or positions selected from the group including: 234, 235, 238, 250, 252, 254, 256, 265, 272, 286, 303, 305, 307, 311, 312, 317, 322, 340, 356, 360, 362, 376, 378, 380, 382, 413, 424, 428, and 434, according to EU numbering of the Fc region.

[0276] In some embodiments, the Fc variants have one or more amino acid substitutions selected from the group including: 234F, 235Q, 250E, 250Q, 252T, 252Y, 254T, 256E, 428L, 428F, 434S, 434A, 428L/434S, 428L/434A, 252Y/254T/256E, 234F/235Q/252T/254T/256E/322Q, 250E/428F, 250E/428L, 250Q/428F, and 250Q/428L, according to EU numbering.

[0277] In some embodiments, antibodies described can include M428L/N434S or M428L/N434A substitutions in one or both Fc domains, which can result in longer half-life in serum. In more embodiments, a first Fc domain or a second Fc domain include M428L/N434S substitutions. In more embodiments, a first Fc domain and a second Fc domain include M428L/N434S substitutions. In certain embodiments, a first Fc domain or a second Fc domain include M428L/N434A substitutions. In certain embodiments, a first Fc domain and a second Fc domain include M428L/N434A substitutions. In other embodiments, a first Fc domain and/or a second Fc domain include M252Y/S254T/T256E substitutions. Such substitutions can result in longer half-life in serum of molecules comprising such.

[0278] 3. Fc Variants for Heterodimerization

[0279] In some embodiments, the antibodies, including multispecific antibodies provided herein are heterodimeric antibodies that include two variant Fc domain sequences. Such variant Fc domains include amino acid modifications to facilitate the self-assembly and/or purification of the heterodimeric antibodies.

[0280] An ongoing problem in antibody technologies is the desire for “bispecific” antibodies that bind to two different antigens simultaneously, in general thus allowing the different antigens to be brought into proximity and resulting in new functionalities and new therapies. In general, these antibodies are made by including genes for each heavy and light chain into the host cells. This generally results in the formation of the desired heterodimer (A-B), as well as the two homodimers (A-A and B-B (not including the light chain heterodimeric issues)). However, a major obstacle in the formation of bispecific antibodies is the difficulty in biasing the formation of the desired heterodimeric antibody over the formation of the homodimers and/or purifying the heterodimeric antibody away from the homodimers.

[0281] There are a number of mechanisms that can be used to generate the subject heterodimeric antibodies. In addition, as will be appreciated by those in the art, these different mechanisms can be combined to ensure high heterodimerization. Amino acid modifications that facilitate the production and purification of heterodimers are collectively referred to generally as “heterodimerization variants.” As discussed below, heterodimerization variants include “skew” variants (e.g., the “knobs and holes” and the “charge pairs” variants described below) as well as “pI variants,” which allow purification of heterodimers from homodimers. As is generally described in U.S. Pat. No. 9,605,084, hereby incorporated by reference in its entirety and specifically as below for the discussion of heterodimerization variants, useful mechanisms for heterodimerization include “knobs and holes” (“KIH”) as described in U.S. Pat. No. 9,605,084, “electrostatic steering” or “charge pairs” as described in U.S. Pat. No. 9,605,084, pI variants as described in U.S. Pat. No. 9,605,084, and general additional Fc variants as outlined in U.S. Pat. No. 9,605,084 and below.

[0282] Heterodimerization variants that are useful for the formation and purification of the subject heterodimeric antibodies away from homodimers are further discussed in detailed below.

[0283] There are a number of suitable pairs of sets of heterodimerization skew variants. These variants come in “pairs” of “sets”. That is, one set of the pair is incorporated into the first monomer and the other set of the pair is incorporated into the second monomer. It should be noted that these sets do not necessarily behave as “knobs in holes” variants, with a one-to-one correspondence between a residue on one monomer and a residue on the other; that is, these pairs of sets form an interface between the two monomers that encourages heterodimer formation and discourages homodimer formation, allowing the percentage of heterodimers that spontaneously form under biological conditions to be over 90%, rather than the expected 50% (25 homodimer A/A:50% heterodimer A/B:25% homodimer B/B).

[0284] i. Skew Variants

[0285] In some embodiments, the heterodimeric antibody includes skew (e.g., steric) variants which are one or more amino acid modifications in a first Fc domain (A) and/or a second Fc domain (B) that favor the formation of Fc heterodimers (Fc dimers that include the first and the second Fc domain; (A-B) over Fc homodimers (Fc dimers that include two of the first Fc domain or two of the second Fc domain; A-A or B-B). Suitable skew variants are included in the FIG. 29 of US Publ. App. No. 2016/0355608, hereby incorporated by reference in its entirety and specifically for its disclosure of skew variants, as well as in the figures, such as FIGS. 1A-1F.

[0286] Thus, suitable Fc heterodimerization variant pairs that will permit the formation of heterodimeric Fc regions are shown in FIGS. 1A-1F. Thus, a first Fc domain has first Fc heterodimerization variants and the second Fc domain has second Fc heterodimerization variants selected from the pairs in FIGS. 1A-1F.

[0287] One mechanism is generally referred to in the art as “knobs and holes,” referring to amino acid engineering that creates steric influences to favor heterodimeric formation and disfavor homodimeric formation can also optionally be used; this is sometimes referred to as “knobs and holes,” as described in U.S. Ser. No. 61/596,846, Ridgway et al., Protein Engineering 9(7):617 (1996); Atwell et al., J. Mol. Biol. 1997 270:26; U.S. Pat. No. 8,216,805, all of which are hereby incorporated by reference in their entirety. The Figures identify a number of “monomer A-monomer B” pairs that rely on “knobs and holes”. In addition, as described in Merchant et al., Nature Biotech. 16:677 (1998), these “knobs and hole” mutations can be combined with disulfide bonds to skew formation to heterodimerization.

[0288] An additional mechanism that finds use in the generation of heterodimers is sometimes referred to as “electrostatic steering” as described in Gunasekaran et al., J. Biol. Chem. 285(25):19637 (2010), hereby incorporated by reference in its entirety. This mechanism is also sometimes referred to herein as “charge pairs”. In this embodiment, electrostatics are used to skew the formation towards heterodimerization. As those in the art will appreciate, these variants may also have an effect on pI, and thus on purification, and thus could in some cases also be considered pI variants. However, as these were generated to force heterodimerization and were not used as purification tools, they are classified as “steric variants”. These include, but are not limited to, D221E/P228E/L368E paired with D221R/P228R/K409R (e.g., these are “monomer corresponding sets) and C220E/P228E/368E paired with C220R/E224R/P228R/K409R.

[0289] In some embodiments, the skew variants advantageously and simultaneously favor heterodimerization based on both the “knobs and holes” mechanism as well as the “electrostatic steering” mechanism. In some embodiments, the heterodimeric antibody includes one or more sets of such heterodimerization skew variants. These variants come in “pairs” of “sets”. That is, one set of the pair is incorporated into the first monomer and the other set of the pair is incorporated into the second monomer. It should be noted that these sets do not necessarily behave as “knobs in holes” variants, with a one-to-one correspondence between a residue on one monomer and a residue on the other. That is, these pairs of sets may instead form an interface between the two monomers that encourages heterodimer formation and discourages homodimer formation, allowing the percentage of heterodimers that spontaneously form under biological conditions to be over 90%, rather than the expected 50% (25% homodimer A/A:50% heterodimer A/B:25% homodimer B/B). Exemplary heterodimerization skew variants are depicted in FIGS. 1A-1F. Such skew variants include, but are not limited to: S364K/E357Q:L368D/K370S; L368D/K370S:S364K; L368E/K370S:S364K; T411E/K360E/Q362E:D401K; L368D/K370S:S364K/E357L; K370S:S364K/E357Q (EU numbering). In terms of nomenclature, the pair “S364K/E357Q:L368D/K370S” means that one of the monomers has the double variant set S364K/E357Q and the other has the double variant set L368D/K370S.

[0290] In exemplary embodiments, the heterodimeric antibody includes Fc heterodimerization variants as sets: S364K/E357Q:L368D/K370S; L368D/K370S:S364K; L368E/K370S:S364K; T411E/K360E/Q362E:D401K; L368D/K370S:S364K/E357L; K370S:S364K/E357Q; or a T366S/L368A/Y407V:T366W (optionally including a bridging disulfide, T366S/L368A/Y407V/Y349C:T366W/S354C or T366S/L368A/Y407V/S354C:T366W/Y349C) are all skew variant amino acid substitution sets of Fc heterodimerization variants. In an exemplary embodiment, the heterodimeric antibody includes a “S364K/E357Q:L368D/K370S” amino acid substitution set. In terms of nomenclature, the pair “S364K/E357Q:L368D/K370S” means that one of the monomers includes an Fc domain that includes the amino acid substitutions S364K and E357Q and the other monomer includes an Fc domain that includes the amino acid substitutions L368D and K370S; as above, the “strandedness” of these pairs depends on the starting pI.

[0291] In some embodiments, the skew variants provided herein can be optionally and independently incorporated with any other modifications, including, but not limited to, other skew variants (see, e.g., in FIG. 37 of US Publ. App. No. 2012/0149876, herein incorporated by reference, particularly for its disclosure of skew variants), pI variants, isotypic variants, FcRn variants, ablation variants, etc. into one or both of the first and second Fc domains of the heterodimeric antibody. Further, individual modifications can also independently and optionally be included or excluded from the subject the heterodimeric antibody.

[0292] Additional monomer A and monomer B variants that can be combined with other variants, optionally and independently in any amount, such as pI variants outlined herein or other steric variants that are shown in FIG. 37 of US 2012/0149876, the figure and legend and SEQ ID NOs of which are incorporated expressly by reference herein.

[0293] In some embodiments, the steric variants outlined herein can be optionally and independently incorporated with any pI variant (or other variants such as, for example, Fc ADCC variants, FcRn variants, etc.) into one or both monomers, and can be independently and optionally included or excluded from the proteins of the antibodies described herein.

[0294] A subset of skew variants are “knobs in holes” (KIH) variants. Exemplary “knob-in-hole” variants are depicted in FIG. 7 of U.S. Pat. No. 8,216,805, which is incorporated herein by reference. Such “knob-in-hole” variants include, but are not limited to: an amino acid substitution at position 347, 349, 350, 351, 357, 366, 368, 370, 392, 394, 395, 397, 398, 399, 405, 407 and/or 409 of the CH3 constant domain of an IgG such as an IgG1, IgG2a, IgG2b, or IgG4 (Kabat numbering). In some embodiments, the “knob-in-hole” variants include, but are not limited to: an amino acid substitution at Y349, L351, E357, T366, L368, K370, N390, K392, T394, D399, S400, F405, Y407, K409, R409, T411, or any combination thereof of the CH3 domain of an IgG such as an IgG1, IgG2a, IgG2b, or IgG4 (EU numbering). In some embodiments, the “knob-in-hole” variants include, but are not limited to: one or more amino acid substitutions including Y349D/E, L351D/K/Y, E357K, T366A/K/Y, L368E, K370E, N390D/K/R, K392E/F/L/M/R, T394W, D399K/R/W/Y, S400D/E/K/R, F405A/I/M/S/T/V/W, Y407A/Y, K409E/D/F, R409E/D/F, and T411D/E/K/N/Q/R/W.

[0295] In some embodiments, such variants include one or more amino acid substitutions including, but not limited to: Y349C, E357K, S354C, T366S, T366W, T366Y, L368A, K370E, T394S T394W, D399K, F405A, F405W, Y407A, Y407T, Y407V, R409D, T366Y/F405A, T394W/Y407T, T366W/F405W, T394S/Y407A, F405W/Y407A, and T366W/T394S (EU numbering). In some embodiments, these variants include knob:hole paired substitutions including, but not limited to: T366W:Y407V; S354C/T366W:Y349C/T366S/Y407V; Y349C/T366W:S354C/T366S/L368A/Y407V; Y349C/T366W/R409D/K370E:S354C/T366S/L368A/Y407V/D399K/E357K; R409D/K370E:D399K/E357K; T366W:T366S/L368A/Y407V; T366W/R409D/K370E:T366S/L368A/Y407V/D399K/E357K; T366W:T366S/L368A/Y407V; T366W/Y366Y:T366S/L368A/T394W/F405A/Y407V; Y349C/T366W:S354C/T366S/L368A/Y407V; Y349C/T366W/R409D/K370E:S354C/T366S/L368A/Y407V/D399K/E357K paired substitutions, according to EU numbering.

[0296] Additional exemplary “knob-in-hole” variants as described by the amino acid substitutions of the CH3 domains can be found in, for example, Carter et al., J. Immunol. Methods, 248(1-2):7-15 (2001), Merchant et al. Nat. Biotechnol. 16(7):677-81 (1998), Ridgway et al. Protein Eng. 9(7):617-2 (1996), and U.S. Pat. Nos. 8,216,805 and 10,287,352, the disclosures of which are herein incorporated by reference in their entireties.

[0297] ii. pI (Isoelectric Point) Variants for Heterodimers

[0298] In some embodiments, the heterodimeric antibody includes purification variants that advantageously allow for the separation of heterodimeric antibody from homodimeric proteins.

[0299] There are several basic mechanisms that can lead to ease of purifying heterodimeric antibodies. For example, modifications to one or both of the antibody heavy chain monomers A and B such that each monomer has a different pI allows for the isoelectric purification of heterodimeric A-B antibody from monomeric A-A and B-B proteins. Alternatively, some scaffold formats, such as the “1+1 Fab-scFv-Fc” format and the “2+1 Fab₂-scFv-Fc” format, also allows separation on the basis of size. As described above, it is also possible to “skew” the formation of heterodimers over homodimers using skew variants. Thus, a combination of heterodimerization skew variants and pI variants find particular use in the heterodimeric antibodies provided herein.

[0300] Additionally, as more fully outlined below, depending on the format of the heterodimeric antibody, pI variants either contained within the constant region and/or Fc domains of a monomer, and/or domain linkers can be used. In some embodiments, the heterodimeric antibody includes additional modifications for alternative functionalities that can also create pI changes, such as Fc, FcRn and KO variants.

[0301] In some embodiments, the subject heterodimeric antibodies provided herein include at least one monomer with one or more modifications that alter the pI of the monomer (i.e., a “pI variant”). In general, as will be appreciated by those in the art, there are two general categories of pI variants: those that increase the pI of the protein (basic changes) and those that decrease the pI of the protein (acidic changes). As described herein, all combinations of these variants can be done: one monomer may be wild type, or a variant that does not display a significantly different pI from wild-type, and the other can be either more basic or more acidic. Alternatively, each monomer is changed, one to more basic and one to more acidic.

[0302] Depending on the format of the heterodimer antibody, pI variants can be either contained within the constant and/or Fc domains of a monomer, or charged linkers, either domain linkers or scFv linkers, can be used. That is, antibody formats that utilize scFv(s) such as “1+1 Fab-scFv-Fc,” format can include charged scFv linkers (either positive or negative), that give a further pI boost for purification purposes. As will be appreciated by those in the art, some 1+1 Fab-scFv-Fc formats are useful with just charged scFv linkers and no additional pI adjustments, although the antibodies described herein do provide pI variants that are on one or both of the monomers, and/or charged domain linkers as well. In addition, additional amino acid engineering for alternative functionalities may also confer pI changes, such as Fc, FcRn and KO variants.

[0303] In subject heterodimeric antibodies for which pI is used as a separation mechanism to allow the purification of heterodimeric proteins, amino acid variants are introduced into one or both of the monomer polypeptides. That is, the pI of one of the monomers (referred to herein for simplicity as “monomer A”) can be engineered away from monomer B, or both monomer A and B can be changed, with the pI of monomer A increasing and the pI of monomer B decreasing. As is outlined more fully below, the pI changes of either or both monomers can be done by removing or adding a charged residue (e.g., a neutral amino acid is replaced by a positively or negatively charged amino acid residue, e.g., glycine to glutamic acid), changing a charged residue from positive or negative to the opposite charge (e.g., aspartic acid to lysine) or changing a charged residue to a neutral residue (e.g., loss of a charge; lysine to serine). A number of these variants are shown in the FIG. 2.

[0304] Thus, in some embodiments, the subject heterodimeric antibody includes amino acid modifications in the constant regions that alter the isoelectric point (pI) of at least one, if not both, of the monomers of a dimeric protein to form “pI antibodies”) by incorporating amino acid substitutions (“pI variants” or “pI substitutions”) into one or both of the monomers. As shown herein, the separation of the heterodimers from the two homodimers can be accomplished if the pIs of the two monomers differ by as little as 0.1 pH unit, with 0.2, 0.3, 0.4 and 0.5 or greater all finding use in the antibodies described herein.

[0305] As will be appreciated by those in the art, the number of pI variants to be included on each or both monomer(s) to achieve good separation will depend in part on the starting pI of the components, for example in the 1+1 Fab-scFv-Fc and 2+1 Fab2-scFv-Fc formats, the starting pI of the scFv and Fab(s) of interest. That is, to determine which monomer to engineer or in which “direction” (e.g., more positive, or more negative), the Fv sequences of the two target antigens are calculated and a decision is made from there. As is known in the art, different Fvs will have different starting pIs which are exploited in the antibodies described herein. In general, as outlined herein, the pIs are engineered to result in a total pI difference of each monomer of at least about 0.1 logs, with 0.2 to 0.5 being preferred as outlined herein.

[0306] In the case where pI variants are used to achieve heterodimerization, by using the constant region(s) of the heavy chain(s), a more modular approach to designing and purifying bispecific proteins, including antibodies, is provided. Thus, in some embodiments, heterodimerization variants (including skew and pI heterodimerization variants) are not included in the variable regions, such that each individual antibody must be engineered. In addition, in some embodiments, the possibility of immunogenicity resulting from the pI variants is significantly reduced by importing pI variants from different IgG isotypes such that pI is changed without introducing significant immunogenicity. Thus, an additional problem to be solved is the elucidation of low pI constant domains with high human sequence content, e.g., the minimization or avoidance of non-human residues at any particular position. Alternatively, or in addition to isotypic substitutions, the possibility of immunogenicity resulting from the pI variants is significantly reduced by utilizing isosteric substitutions (e.g., Asn to Asp; and Gln to Glu).

[0307] As discussed below, a side benefit that can occur with this pI engineering is also the extension of serum half-life and increased FcRn binding. That is, as described in US Publ. App. No. US 2012/0028304 (incorporated by reference in its entirety), lowering the pI of antibody constant domains (including those found in antibodies and Fc fusions) can lead to longer serum retention in vivo. These pI variants for increased serum half-life also facilitate pI changes for purification.

[0308] In addition, it should be noted that the pI variants give an additional benefit for the analytics and quality control process of bispecific antibodies, as the ability to either eliminate, minimize, and distinguish when homodimers are present is significant. Similarly, the ability to reliably test the reproducibility of the heterodimeric antibody production is important.

[0309] In general, embodiments of particular use rely on sets of variants that include skew variants, which encourage heterodimerization formation over homodimerization formation, coupled with pI variants, which increase the pI difference between the two monomers to facilitate purification of heterodimers away from homodimers.

[0310] Exemplary combinations of pI variants are shown in FIGS. 4 and 5, and FIG. 30 of US Publ. App. No. 2016/0355608, all of which are herein incorporated by reference in its entirety and specifically for the disclosure of pI variants. Preferred combinations of pI variants are shown in FIG. 2. As outlined herein and shown in the figures, these changes are shown relative to IgG1, but all isotypes can be altered this way, as well as isotype hybrids. In the case where the heavy chain constant domain is from IgG2-4, R133E and R133Q can also be used.

[0311] In one embodiment, a preferred combination of pI variants has one monomer (the negative Fab side) comprising 208D/295E/384D/418E/421D variants (N208D/Q295E/N384D/Q418E/N421D when relative to human IgG1) and a second monomer (the positive scFv side) comprising a positively charged scFv linker, including (GKPGS)4 (SEQ ID NO: 10). However, as will be appreciated by those in the art, the first monomer includes a CH1 domain, including position 208. Accordingly, in constructs that do not include a CH1 domain (for example for fusion proteins that do not utilize a CH1 domain on one of the domains), a preferred negative pI variant Fc set includes 295E/384D/418E/421D variants (Q295E/N384D/Q418E/N421D when relative to human IgG1).

[0312] Accordingly, in some embodiments, one monomer has a set of substitutions from FIG. 2 and the other monomer has a charged linker (either in the form of a charged scFv linker because that monomer comprises an scFv or a charged domain linker, as the format dictates, which can be selected from those depicted in FIG. 5 (see, e.g., SEQ ID NOs: 1-11, 20, 21, and 81-92)).

[0313] In some embodiments, modifications are made in the hinge of the Fc domain, including positions 216, 217, 218, 219, 220, 221, 222, 223, 224, 225, 226, 227, 228, 229, and 230 based on EU numbering. Thus, pI mutations and particularly substitutions can be made in one or more of positions 216-230, with 1, 2, 3, 4 or 5 mutations finding use. Again, all possible combinations are contemplated, alone or with other pI variants in other domains.

[0314] Specific substitutions that find use in lowering the pI of hinge domains include, but are not limited to, a deletion at position 221, a non-native valine or threonine at position 222, a deletion at position 223, a non-native glutamic acid at position 224, a deletion at position 225, a deletion at position 235 and a deletion or a non-native alanine at position 236. In some cases, only pI substitutions are done in the hinge domain, and in others, these substitution(s) are added to other pI variants in other domains in any combination.

[0315] In some embodiments, mutations can be made in the CH2 region, including positions 233, 234, 235, 236, 274, 296, 300, 309, 320, 322, 326, 327, 334 and 339, based on EU numbering. It should be noted that changes in 233-236 can be made to increase effector function (along with 327A) in the IgG2 backbone. Again, all possible combinations of these 14 positions can be made; e.g., may include a variant Fc domain with 1, 2, 3, 4, 5, 6, 7, 8, 9 or 10 CH2 pI substitutions.

[0316] Specific substitutions that find use in lowering the pI of CH2 domains include, but are not limited to, a non-native glutamine or glutamic acid at position 274, a non-native phenylalanine at position 296, a non-native phenylalanine at position 300, a non-native valine at position 309, a non-native glutamic acid at position 320, a non-native glutamic acid at position 322, a non-native glutamic acid at position 326, a non-native glycine at position 327, a non-native glutamic acid at position 334, a non-native threonine at position 339, and all possible combinations within CH2 and with other domains.

[0317] In this embodiment, the modifications can be independently and optionally selected from position 355, 359, 362, 384, 389, 392, 397, 418, 419, 444 and 447 (EU numbering) of the CH3 region. Specific substitutions that find use in lowering the pI of CH3 domains include, but are not limited to, a non-native glutamine or glutamic acid at position 355, a non-native serine at position 384, a non-native asparagine or glutamic acid at position 392, a non-native methionine at position 397, a non-native glutamic acid at position 419, a non-native glutamic acid at position 359, a non-native glutamic acid at position 362, a non-native glutamic acid at position 389, a non-native glutamic acid at position 418, a non-native glutamic acid at position 444, and a deletion or non-native aspartic acid at position 447.

[0318] In one embodiment, for example in the Figure formats, a preferred combination of pI variants has one monomer (the negative Fab side) comprising 208D/295E/384D/418E/421D variants (N208D/Q295E/N384D/Q418E/N421D when relative to human IgG1) and a second monomer (the positive scFv side) comprising a positively charged scFv linker, including (GKPGS)4 (SEQ ID NO: 93). However, as will be appreciated by those in the art, the first monomer includes a CH1 domain, including position 208. Accordingly, in constructs that do not include a CH1 domain (for example for antibodies that do not utilize a CH1 domain on one of the domains, for example in a dual scFv format or a “one-armed” format such as those depicted in FIG. 8), a preferred negative pI variant Fc set includes 295E/384D/418E/421D variants (Q295E/N384D/Q418E/N421D when relative to human IgG1).

[0319] Accordingly, in some embodiments, one monomer has a set of substitutions from the Figures and the other monomer has a charged linker (either in the form of a charged scFv linker because that monomer comprises an scFv or a charged domain linker, as the format dictates, which can be selected from those depicted in FIG. 5).

[0320] iii. Isotypic Variants

[0321] In addition, many embodiments of the antibodies described herein rely on the “importation” of pI amino acids at particular positions from one IgG isotype into another, thus reducing or eliminating the possibility of unwanted immunogenicity being introduced into the variants. A number of these are shown in FIG. 21 of U.S. Publ. App. No. 2014/0370013, hereby incorporated by reference. That is, IgG1 is a common isotype for therapeutic antibodies for a variety of reasons, including high effector function. However, the heavy constant region of IgG1 has a higher pI than that of IgG2 (8.10 versus 7.31). By introducing IgG2 residues at particular positions into the IgG1 backbone, the pI of the resulting monomer is lowered (or increased) and additionally exhibits longer serum half-life. For example, IgG1 has a glycine (pI 5.97) at position 137, and IgG2 has a glutamic acid (pI 3.22); importing the glutamic acid will affect the pI of the resulting protein. As is described below, a number of amino acid substitutions are generally required to significant affect the pI of the variant antibody. However, it should be noted as discussed below that even changes in IgG2 molecules allow for increased serum half-life.

[0322] In other embodiments, non-isotypic amino acid changes are made, either to reduce the overall charge state of the resulting protein (e.g., by changing a higher pI amino acid to a lower pI amino acid), or to allow accommodations in structure for stability, etc. as is further described below.

[0323] In addition, by pI engineering both the heavy and light constant domains, significant changes in each monomer of the heterodimer can be seen. As discussed herein, having the pIs of the two monomers differ by at least 0.5 can allow separation by ion exchange chromatography or isoelectric focusing, or other methods sensitive to isoelectric point.

[0324] iv. Calculating pI

[0325] The pI of each monomer can depend on the pI of the variant heavy chain constant domain and the pI of the total monomer, including the variant heavy chain constant domain and the fusion partner. Thus, in some embodiments, the change in pI is calculated on the basis of the variant heavy chain constant domain, using the chart in the FIG. 19 of U.S. Publ. App. No. 2014/0370013. As discussed herein, which monomer to engineer is generally decided by the inherent pI of the Fv and scaffold regions. Alternatively, the pI of each monomer can be compared.

[0326] v. pI Variants that Also Confer Better FcRn In Vivo Binding

[0327] In the case where the pI variant decreases the pI of the monomer, they can have the added benefit of improving serum retention in vivo.

[0328] Although still under examination, Fc regions are believed to have longer half-lives in vivo, because binding to FcRn at pH 6 in an endosome sequesters the Fc (Ghetie and Ward, 1997, Immunol Today, 18(12): 592-598, entirely incorporated by reference). The endosomal compartment then recycles the Fc to the cell surface. Once the compartment opens to the extracellular space, the higher pH 7.4, induces the release of Fc back into the blood. In mice, Dall'Acqua et al. showed that Fc mutants with increased FcRn binding at pH 6 and pH 7.4 actually had reduced serum concentrations and the same half-life as wild-type Fc (Dall'Acqua et al., 2002, J. Immunol. 169:5171-5180, entirely incorporated by reference). The increased affinity of Fc for FcRn at pH 7.4 is thought to forbid the release of the Fc back into the blood. Therefore, the Fc mutations that will increase Fc's half-life in vivo will ideally increase FcRn binding at the lower pH while still allowing release of Fc at higher pH. The amino acid histidine changes its charge state in the pH range of 6.0 to 7.4. Therefore, it is not surprising to find His residues at important positions in the Fc/FcRn complex.

[0329] Recently it has been suggested that antibodies with variable regions that have lower isoelectric points may also have longer serum half-lives (Igawa et al., 2010, PEDS, 23(5): 385-392, entirely incorporated by reference). However, the mechanism of this is still poorly understood. Moreover, variable regions differ from antibody to antibody. Constant region variants with reduced pI and extended half-life would provide a more modular approach to improving the pharmacokinetic properties of antibodies, as described herein.

[0330] vi. Additional Fc Variants for Additional Functionality

[0331] In addition to the heterodimerization variants discussed above, there are a number of useful Fc amino acid modification that can be made for a variety of reasons, including, but not limited to, altering binding to one or more FcγR receptors, altered binding to FcRn receptors, etc., as discussed herein.

[0332] Accordingly, the antibodies provided herein (heterodimeric, as well as homodimeric) can include such amino acid modifications with or without the heterodimerization variants outlined herein (e.g., the pI variants and steric variants). Each set of variants can be independently and optionally included or excluded from any particular heterodimeric protein.

[0333] vii. Additional Heterodimerization Variants

[0334] In some embodiments, the first Fc domain comprises one or more amino acid substitutions selected from the group including: L351Y, D399R, D399K, S400D, S400E, S400R, S400K, F405A, F405I, F405M, F405T, F405S, F405V, F405W, Y407A, Y407I, Y407L, Y407V, and any combination thereof, and the second Fc domain comprises one or more amino acid substitutions selected from the group including: T350V, T366A, T366I, T366L, T366M, T366Y, T366S, T366C, T366V, T366W, N390D, N390E, N390R, K392L, K392M, K392I, K392D, K392E, T394W, K409F, K409W, T411N, T411R, T411Q, T411K, T411D, T411E, T411W, and any combination thereof.

[0335] In some embodiments, other heterodimerization pair variants include, but are not limited to, amino acid substitutions of L234A/L235A: wildtype; L234A/L235A: L234K/L235K; L234D/L235E: L234K/L235K; E233A/L234D/L235E: E233A/L234R/L235R; L234D/L235E: E233K/L234R/L235R; E233A/L234K/L235A: E233K/L234A/L235K; E269Q/D270N: E269K/D270R; and WT: L235K/A327K of the CH2 domain, according to the EU numbering.

[0336] In some embodiments, the first and/or second Fc domains comprise one or more amino acid substitutions selected from the group including: S239D, D265S, S267D, E269K, S298A, K326E, A330L and I332E. In certain instances, the Fc paired variants include, but are not limited to, S239D/D265S/I332E/E269K: S239D/D265S/S298A; S239D/K326E/A330L/I332E: S298A or S239D/K326E/A330L/I332E/E269K: S298A of the CH2 domain, according to EU numbering.

[0337] Additional descriptions of useful heterodimeric variants are disclosed in U.S. Pat. Nos. 9,732,155; 10,457,742 and 10,875,931 and U.S. Publ. App. Nos. 2021/0277150 and 2020/0087414, the disclosures of which, including the description of Fc domain variants are herein incorporated by reference in their entireties.

[0338] 4. Ablation Variants

[0339] While in general NK engager multispecific antibodies retain at binding to CD16A (including “wild type” binding or increased binding to CD16A as outlined above), in some cases, surprisingly, NK engager activity can be seen even when binding to CD16A has been reduced or ablated. Accordingly, provided is another category of functional Fc variants to include are “FcγR ablation variants” or “Fc knock out (FcKO or KO)” variants. In these embodiments, it is desirable to reduce or remove the normal binding of the Fc domain to one or more or all of the Fcγ receptors (e.g., FcγR1, FcγRIIa, FcγRIIb, FcγRIIIa, etc.) to avoid additional mechanisms of action. That is, for example, in many embodiments, particularly in the use of bispecific antibodies that bind a target antigen monovalently it is generally desirable to ablate FcγRIIIa binding to eliminate or significantly reduce ADCC activity. Wherein one of the Fc domains comprises one or more Fcγ receptor ablation variants. These ablation variants are depicted in FIG. 3, and each can be independently and optionally included or excluded, with preferred aspects utilizing ablation variants selected from the group including G236R/L328R, E233P/L234V/L235A/G236del/S239K, E233P/L234V/L235A/G236del/S267K, E233P/L234V/L235A/G236del/S239K/A327G, E233P/L234V/L235A/G236del/S267K/A327G and E233P/L234V/L235A/G236del. It should be noted that the ablation variants referenced herein ablate FcγR binding but generally not FcRn binding.

[0340] As is known in the art, the Fc domain of human IgG1 has the highest binding to the Fcγ receptors, and thus ablation variants can be used when the constant domain (or Fc domain) in the backbone of the heterodimeric antibody is IgG1. Alternatively, or in addition to ablation variants in an IgG1 background, mutations at the glycosylation position 297 (generally to A or S) can significantly ablate binding to FcγRIIIa, for example. Human IgG2 and IgG4 have naturally reduced binding to the Fcγ receptors, and thus those backbones can be used with or without the ablation variants.

[0341] 5. Combination of Heterodimeric and Fc Variants

[0342] As will be appreciated by those in the art, all of the recited heterodimerization variants (including skew and/or pI variants) can be optionally and independently combined in any way, as long as they retain their “strandedness” or “monomer partition”. In addition, all of these variants can be combined into any of the heterodimerization formats.

[0343] In the case of pI variants, while embodiments finding particular use are shown in the Figures, other combinations can be generated, following the basic rule of altering the pI difference between two monomers to facilitate purification.

[0344] In addition, any of the heterodimerization variants, skew, and pI, are also independently and optionally combined with Fc ADCC variants, Fc variants, FcRn variants, or Fc ablation variants, as generally outlined herein.

[0345] Exemplary combination of variants that are included in some embodiments of the heterodimeric format antibodies are included in FIGS. 8A-8N. In certain embodiments, the heterodimeric format antibodies, including multispecific antibodies, bind to NK cells.

[0346] Accordingly, the antibodies provided herein (heterodimeric, as well as homodimeric) can include such amino acid modifications with or without the heterodimerization variants outlined herein (e.g., the pI variants and steric variants). Each set of variants can be independently and optionally included or excluded from any particular heterodimeric protein.

[0347] 6. Afucosylated Fc Domains

[0348] In some embodiments, the increased binding of a Fc domain to CD16A is the result of producing the NKE in a cell line that reduces or eliminates the incorporation of fucose into the glycosylation of the NKE. See, for example, Pereira et al., MAbs (2018) 10(5):693-711.

[0349] In some embodiments, antibodies comprising Fc domains described are produced in a host cell such that the Fc domains have reduced fucosylation or no fucosylation compared to a parental Fc domain. In some instances, antibodies described are produced in a genetically modified host cell, wherein the genetic modification to the host cell results in the overexpression of β(1,4)-N-acetylglucosaminyltransferase III (GnTIII), a glycosyltransferase catalyzing the formation of bisected oligosaccharides, which are generally also non-fucosylated. N-glycosylation of the Fc domain can play a role in binding to FcγR; and afucosylation of the N-glycan can increase the binding capacity of the Fc domain to FcγRIIIa. As discussed in further detail above, an increase in FcγRIIIa binding can enhance ADCC, which can be advantageous in certain antibody therapeutic applications in which cytotoxicity is desirable.

[0350] In some embodiments, an Fc domain is engineered such that it has reduced fucosylation or no fucosylation, compared to a parental Fc domain. In the context of an Fc domain, the terms “afucosylation,” “afucosylated,” “defucosylation,” and “defucosylated” are used interchangeably, and generally refer to the absence or removal of core-fucose from the N-glycan attached to the CH2 domain of an Fc domain. For instance, an afucosylated antibody lacks core fucosylation in the Fc domain. As used herein, the phrase “a low level of fucosylation” or “reduced fucosylation” generally refers to an overall fucosylation level in a specific Fc domain that is no more than about 10.0%, no more than 5.0%, no more than 2.5%, no more than 1.0%, no more than about 0.5%, no more than 0.25%, no more than about 0.1%, or no more than 0.01%, compared to the fucosylation level of parental Fc domain. The term “% fucosylation” generally refers to the level of fucosylation in a specific Fc domain compared to that of a parental Fc domain. The % fucosylation can be measured according to any suitable method known in the relevant art, such as, for example, by mass spectrometry (MS), HPLC-Chip Cube MS (Agilent), and reverse phase-HPLC.

[0351] In some embodiments, a particular level of fucosylation is desired. In some embodiments, a Fc variant is provided, wherein the Fc variant comprises a particular level of afucosylation. In some further embodiments, the fucosylation level of the Fc variant is no more than about 10.0%, no more than about 9.0%, no more than about 8.0%, no more than about 7.0%, no more than about 6.0%, no more than about 5.0%, no more than about 4.0%, no more than about 3.0%, no more than about 2.0%, no more than about 1.5%, no more than about 1.0%, no more than about 0.5%, no more than 0.25%, no more than about 0.1%, or no more than 0.01%, compared to that of a parental Fc domain.

[0352] In some embodiments, antibodies comprising afucosylated Fc domains can be enriched (to obtain a particular level of afucosylation) by affinity chromatography using resins conjugated with a fucose binding moiety, such as, for example, an antibody or lectin specific for fucose, with some embodiments finding particular utility when fucose is present in a 1-6 linkage (see, e.g., Kobayashi et al., 2012, J. Biol. Chem. 287:33973-82).

[0353] In some embodiments, the fucosylated species of the Fc domain can be separated from the afucosylated species of the Fc domain (to obtain a particular level of afucosylation) using an anti-fucose specific antibody in an affinity column. Alternatively, or in addition to, afucosylated species can be separated from fucosylated species based on the differential binding affinity to FcγRIIIa using affinity chromatography (again, to obtain a particular level of afucosylation).

[0354] C. Useful Formats of the Invention

[0355] As will be appreciated by those in the art, and discussed more fully below, the heterodimeric bispecific antibodies provided herein can take on a wide variety of configurations, as are generally depicted in FIGS. 8A-8N. Some figures depict “single ended” configurations, where there is one type of specificity on one “arm” of the molecule and a different specificity on the other “arm.” Other figures depict “dual ended” configurations, where there is at least one type of specificity at the “top” of the molecule and one or more different specificities at the “bottom” of the molecule. Thus, in some embodiments, the antibodies described herein are directed to novel immunoglobulin compositions that co-engage a first antigen and a second antigen that are different.

[0356] As will be appreciated by those in the art, the heterodimeric formats of the antibodies described herein can have different valences (e.g., bivalent, trivalent, etc.), as well as specificity (e.g., bispecific). That is, in some embodiments, heterodimeric antibodies of the antibodies described herein can be bivalent and bispecific, wherein one target antigen (e.g., a NK cell antigen) is bound by a first binding domain and the other target antigen (e.g., a TTA antigen) is bound by a second binding domain. In other embodiments, the heterodimeric antibodies can be trivalent and bispecific, wherein the first antigen is bound by two binding domains (i.e., a first binding domain and a second binding domain) and the second antigen is bound by the first binding domain or the second binding domain.

[0357] The antibodies described herein utilize anti-NK cell ABDs in combination with anti-TTA ABDs. As will be appreciated by those in the art, any collection of anti-NK cell CDRs, anti-NK cell antigen variable light and variable heavy domains, Fabs, and scFvs as described herein, and depicted in any of the Figures can be used, optionally and independently combined in any combination. Similarly, any of the anti-TTA ABDs can be used, whether CDRs, variable light and variable heavy domains, Fabs, and scFvs as described herein, and depicted in any of the Figures can be used, optionally and independently combined in any combination.

[0358] 1. 1+1 Fab-scFv-Fc Format

[0359] One heterodimeric scaffold that finds particular use in the antibodies described herein is the “1+1 Fab-scFv-Fc” or “bottle-opener” or “1+1 Fab×scFv” format, as is shown in FIG. 8A. In this embodiment, one heavy chain monomer of the antibody contains a single chain Fv (“scFv,” as described below) and an Fc domain. The scFv includes a variable heavy domain (VH1) and a variable light domain (VL1), wherein the VH1 is attached to the VL1 using an scFv linker that can be charged (see, e.g., FIG. 5; SEQ ID NOs: 1-11, 20, 21, and 81-92). The scFv is attached to the heavy chain using a domain linker (see, e.g., FIGS. 6 and 7; SEQ ID NOs: 30, 31, 40, 41, 50, 51, and 94-119). The other heavy chain monomer is a “regular” heavy chain (V_{H}-CH1-hinge-CH2-CH3). The 1+1 Fab-scFv-Fc also include a light chain that interacts with the V_{H}-CH1 to form a Fab. This structure is sometimes referred to herein as the “bottle-opener” format due to a rough visual similarity to a bottle-opener. The two heavy chain monomers are brought together by the use of amino acid variants (e.g., heterodimerization variants, as discussed above) in the constant regions (e.g., the Fc domain, the CH1 domain, and/or the hinge region) that promote the formation of heterodimeric antibodies, as is described more fully below.

[0360] There are several distinct advantages to the present “1+1 Fab-scFv-Fc” format. As is known in the art, antibody analogs relying on two scFv constructs often have stability and aggregation problems, which can be alleviated in the antibodies described herein by the addition of a “regular” heavy and light chain pairing. In addition, as opposed to formats that rely on two heavy chains and two light chains, there is no issue with the incorrect pairing of heavy and light chains (e.g., heavy 1 pairing with light 2, etc.).

[0361] Many of the embodiments outlined herein rely in general on the 1+1 Fab-scFv-Fc or “bottle opener” format antibody that comprises a first monomer comprising an scFv, comprising a variable heavy and a variable light domain, covalently attached using an scFv linker (charged, in many but not all instances), where the scFv is covalently attached to the N-terminus of a first Fc domain, usually through a domain linker. The domain linker can be either charged or uncharged, and exogenous or endogenous (e.g., all or part of the native hinge domain). Any suitable linker can be used to attach the scFv to the N-terminus of the first Fc domain. In some embodiments, the domain linker is chosen from the domain linkers in FIGS. 6 and 7. The second monomer of the 1+1 Fab-scFv-Fc format or “bottle opener” format is a heavy chain, and the composition further comprises a light chain.

[0362] In general, in many preferred embodiments, the scFv is the domain that binds to the NK cell antigen, and the Fab forms a TTA binding domain. However, in several preferred embodiments, the scFv is the domain that binds to the TTA, and the Fab forms a NK cell antigen binding domain. An exemplary anti-NK cell antigen x anti-TTA bispecific antibody of the 1+1 Fab-scFv-Fc format is depicted schematically in FIG. 8A.

[0363] In addition, the Fc domains of the antibodies described herein generally include one or more of: (a) Fc ADCC variants (see, e.g., FIG. 4), (b) skew variants (see, e.g., FIGS. 1A-1F; with particularly useful skew variants being selected from the group including: (i) S364K/E357Q:L368D/K370S, (ii) L368D/K370S:S364K, (iii) L368E/K370S:S364K, (iv) T411E/K360E/Q362E:D401K, (v) L368D/K370S:S364K/E357L, (vi) K370S:S364K/E357Q, (vii) T366S/L368A/Y407V:T366W, and (viii) T366S/L368A/Y407V/Y349C:T366W/S354C), (c) optionally ablation variants (see, e.g., FIG. 3), (d) optionally charged scFv linkers (including those shown in FIG. 5; see, e.g., SEQ ID NOs: 1-11, 20, 21, and 81-92), and the heavy chain can comprise pI variants (including, but not limited to, those shown in FIGS. 1 and 2).

[0364] In certain embodiments the 1+1 Fab-scFv-Fc scaffold format includes a first monomer that includes a scFv-domain linker-CH2-CH3 monomer, a second monomer that includes a first variable heavy domain-CH1-hinge-CH2-CH3 monomer, and a third monomer that includes a first variable light domain. In some embodiments, the CH2-CH3 of the first monomer is a first variant Fc domain and the CH2-CH3 of the second monomer is a second variant Fc domain. In some embodiments, the scFv includes a scFv variable heavy domain and a scFv variable light domain that form a NK cell antigen binding moiety. In other embodiments, the scFv includes a scFv variable heavy domain and a scFv variable light domain that form a TTA binding moiety. In certain embodiments, the scFv variable heavy domain and scFv variable light domain are covalently attached using an scFv linker (charged, in many but not all instances; see, e.g., FIG. 5 and SEQ ID NOs: 1-11, 20, 21, and 81-92). In some embodiments, the first variable heavy domain and first variable light domain form a TTA binding domain. In other embodiments, the first variable heavy domain and first variable light domain form a NK cell antigen binding domain.

[0365] Any suitable NK cell ABD and/or TTA ABD can be included in the 1+1 Fab-scFv-Fc format antibody, including those provided herein. NK cell antigen binding domain sequences finding particular use in these embodiments include, but are not limited to, those shown in the Figures, or variants thereof. NK cell ABDs that are of particular use in these embodiments include, but are not limited to, V_{H} and V_{L} domains selected from V_{H}/V_{L} pairs selected from those shown in the Figures, or variants thereof. TTA binding domain sequences finding particular use in these embodiments include, but are not limited to those shown in the Figures, or variants thereof. TTA ABDs that are of particular use in these embodiments include, but are not limited to, V_{H} and V_{L} domains selected from V_{H}/V_{L} pairs selected from those shown in the Figures, or variants thereof.

[0366] In some embodiments, the 1+1 Fab-scFv-Fc format includes Fc ADCC variants (see, e.g., FIG. 4), skew variants (see, e.g., FIGS. 1A-1F), and/or pI variants (see, e.g., FIGS. 1 and 2). Accordingly, some embodiments include 1+1 Fab-scFv-Fc formats that comprise: (i) a first monomer (the “scFv monomer”) that comprises a charged scFv linker (with the “+H” sequence of FIG. 5 (i.e., SEQ ID NO: 10) being preferred in some embodiments, the Fc ADCC variants S239D/I332E, the skew variants S364K/E357Q, and an scFv that binds to a first target antigen as outlined herein, (ii) a second monomer (the “Fab monomer”) that comprises the skew variants L368D/K370S, the pI variants N208D/Q295E/N384D/Q418E/N421D, and a variable heavy domain (V_{H}), and (iii) a light chain that includes a variable light domain (V_{L}) and a constant light domain (C_{L}), wherein numbering is according to EU numbering. Further, bispecific antibodies in the 1+1 Fab-scFv-Fc format can also include one or more Fc domains with one or more ablation variants (see, e.g., FIG. 3). In some embodiments, the first target antigen is a NK cell antigen, and the first variable heavy domain and the first variable light domain make up a TTA binding moiety. In other embodiments, the first target antigen is a TTA, and the first variable heavy domain and the first variable light domain make up a NK cell antigen binding moiety. NK cell antigen binding domain sequences finding particular use in these embodiments include, but are not limited to, those shown in the Figures, or variants thereof. TTA binding domain sequences finding particular use in these embodiments include, but are not limited to, those shown in the Figures, or variants thereof.

[0367] In some embodiments, the 1+1 Fab-scFv-Fc format includes Fc ADCC variants (see, e.g., FIG. 4), skew variants (see, e.g., FIGS. 1A-1F), pI variants (see, e.g., FIGS. 1 and 2), and/or FcRn variants (e.g., M428L, N434S, N434A, M428L/N434S, M428L/N434A, M252Y/S254T/T256E, etc.). Accordingly, some embodiments include 1+1 Fab-scFv-Fc formats that comprise: (i) a first monomer (the “scFv monomer”) that comprises a charged scFv linker (with the “+H” sequence of FIG. 5 (i.e., SEQ ID NO: 10) being preferred in some embodiments), the Fc ADCC variants S239D/I332E, the skew variants S364K/E357Q, the FcRn variants M428L/N434S, and an scFv that binds to a first target antigen as outlined herein, (ii) a second monomer (the “Fab monomer”) that comprises the skew variants L368D/K370S, the pI variants N208D/Q295E/N384D/Q418E/N421D, the FcRn variants M428L/N434S or M428L/N434A, and a variable heavy domain, and (iii) a light chain that includes a variable light domain (V_{L}) and a constant light domain (C_{L}), wherein numbering is according to EU numbering. Further, bispecific antibodies in the 1+1 Fab-scFv-Fc format can also include one or more Fc domains with one or more ablation variants (see, e.g., FIG. 3). In some embodiments, the first target antigen is a NK cell antigen, and the first variable heavy domain and the first variable light domain make up a TTA binding moiety. In other embodiments, the first target antigen is a TTA, and the first variable heavy domain and the first variable light domain make up a NK cell antigen binding moiety. NK cell antigen binding domain sequences finding particular use in these embodiments include, but are not limited to, those shown in the Figures, or variants thereof. TTA binding domain sequences finding particular use in these embodiments include, but are not limited to, those shown in the Figures, or variants thereof.

[0368] FIGS. 32-35 show exemplary Fc domain sequences that are useful in the 1+1 Fab-scFv-Fc format antibodies. Generally, the “monomer 1” sequences (as depicted in the Figures) refers to the Fc domain of the “Fab-Fc heavy chain,” and the “monomer 2” sequences (as depicted in the Figures) refer to the Fc domains of the “scFv-Fc heavy chain.”

[0369] In some embodiments, one or both of the Fc domains comprising the heterodimeric Fc backbone pairs are configured such that one or both of the Fc domains have wildtype FcγR effector function. In some embodiments, the heterodimeric Fc backbone pairs have wildtype FcγR effector function, including, but not limited to, those pairs of: (i) SEQ ID NOs: 1798 and 1799, (ii) SEQ ID NOs: 1800 and 1801, (iii) SEQ ID NOs: 1802 and 1803, (iv) SEQ ID NOs: 1804 and 1805, (v) SEQ ID NOs: 1806 and 1807, (vi) SEQ ID NOs: 1808 and 1809, (vii) SEQ ID NOs: 1810 and 1811, (viii) SEQ ID NOs: 1812 and 1813, (ix) SEQ ID NOs: 1814 and 1815, (x) SEQ ID NOs: 1816 and 1817, (xi) SEQ ID NOs: 1818 and 1819, as shown in FIGS. 31A-31C.

[0370] In some embodiments, one or both of the Fc domains comprising the heterodimeric Fc backbone pairs include amino acid substitutions such that one or both of the Fc domains have increased ADCC activity. In certain embodiments, the amino acid substitutions include: S239D, I332E, S239D/I332E, S239E, I332D, S239E/I332E, S239D/I332D, S239E/I332D, S239D/330L/I332E, S239D/A330L, A330L/I332E, F243L, F243L/R292P/Y300L/V305I/P396L, 332I/247I/339Q, S298A/E333A/K334A, V264I/I332E, S298A, S298A/I332E, S298A/E333A.K334A, S239Q/I332E, D265G, Y296Q, S298T, L328I/I332E, V264T, V266I, S239D/I332N, S239E/I332N, S239E/I332Q, S239N/I332E, S239Q/I332D, K326E, A330Y/I332E, V264I/A330Y/I332E, A330L/I332E, V264I/A330L/I332E, L234D, L234E, L234I, L235D, L235T, A330F, L328V/I332E, S239Q/V264I/I332E, S239E/V264I/A330Y/I332E, K274R, N276Y, S324T, K334I, K334F, L234I/L235D, L235D/S239D/A330Y/I332E, S239D/V240I/A330Y/I332E, S239D/V264T/A330Y/I332E, S239D/K326E/A330Y/I332E, S239D/K326T/A330Y/I332E, 3293R, S324G, E272R, P227G, G236S, D221K, H224E, K246H, D249Y, R255Y, E258H, T260H, G281D, E283H, E283L, V284E, S239D/3272I/I332E, S239D/E272Y/A330L/I332E, S239D/E272I/A330L/I332E, S239D/K274E/I332E, S239D/K326T/I332E, S239D/K326E/I332E, S239D/K274E/A330L/I332E, and any of the Fc ADCC variants shown in FIG. 4. In many embodiments, the amino acid substitutions include: S239D, I332E, S239D/I332E, S239E, I332D, S239E/I332E, S239D/I332D, S239E/I332D. In some instances, only monomer 1 or monomer 2 of the heterodimeric Fc backbone pairs include amino acid substitutions resulting in increased ADCC activity. In such an instance, the pair of heterodimeric Fc backbones may be referred to as an asymmetric, ADCC-enhanced heterodimeric Fc backbone pair. In other instances, both monomers (i.e., monomer 1 and monomer 2) of the heterodimeric Fc backbone pairs independently include one or more amino acid substitutions conferring an increased ADCC activity. In such an instance, the pair of heterodimeric Fc backbones may be referred to as a symmetric, ADCC-enhanced heterodimeric Fc backbone pair. As used herein, the terms “asymmetric” and “symmetric” are not intended to mean that the heterodimeric Fc backbone pairs comprise identical mutations, but rather that only one Fc domain (in the case of asymmetric pairs) or both Fc domains (in the case of symmetric pairs) includes amino acid variants conferring an increase in ADCC activity. In some instances, monomer 1 and monomer 2 can contain identical amino acid substitutions (e.g., both monomers contain a S239D substitution, an I332E substitution, or both substitutions are present on both monomers). In other instances, monomer 1 and monomer 2 can contain at least one amino acid substitution that is the same (e.g., monomer 1 may contain the S239D/I332E substitutions, and monomer 2 contains the S239D substitution and is WT with respect to the 332 residue (or the reverse where monomer 2 is WT with respect to the 239 residue and contains the I332E substitution); monomer 2 may contain the S239D/I332E substitutions, and monomer 1 contains the S239D substitution and is WT with respect to the 332 residue (or the reverse where monomer 1 is WT with respect to the 239 residue and contains the I332E substitution); etc.). In still other instances, monomer 1 and monomer 2 can contain amino acid substitutions that are unique to each monomer (e.g., S239D on monomer 1 and I332E on monomer 2, or the reverse). In some embodiments, the heterodimeric Fc backbone pairs have increased ADCC activity, including, but not limited to, those pairs of: (i) SEQ ID NOs: 1820 and 1821, (ii) SEQ ID NOs: 1822 and 1823, (iii) SEQ ID NOs: 1824 and 1825, (iv) SEQ ID NOs: 1826 and 1827, (v) SEQ ID NOs: 1828 and 1829, (vi) SEQ ID NOs: 1830 and 1831, (vii) SEQ ID NOs: 1832 and 1833, (viii) SEQ ID NOs: 1834 and 1835, (ix) SEQ ID NOs: 1836 and 1837, (x) SEQ ID NOs: 1838 and 1839, (xi) SEQ ID NOs: 1840 and 1841, (xii) SEQ ID NOs: 1842 and 1843, (xiii) SEQ ID NOs: 1844 and 1845, (xiv) SEQ ID NOs: 1846 and 1847, and (xv) SEQ ID NOs: 1848 and 1849, as shown in FIGS. 32A-32D (see, e.g., SEQ ID NOs: 1820-1849).

[0371] In some embodiments of the multispecific antibody, one or both of the Fc domains comprising a heterodimeric Fc backbone pair include amino acid substitutions which improve serum half-life of the antibody. In certain embodiments, the amino acid substitutions include one or more of: M252Y/S254T/T256E, M428L, N434S, N434A, M428L/N434S, or M428L/N434A. In some instances, only monomer 1 or monomer 2 of the heterodimeric Fc backbone pairs include amino acid substitutions resulting in improved serum half-life. In such an instance, the pair of heterodimeric Fc backbones may be referred to as an asymmetric, Xtend heterodimeric Fc backbone pair. In other instances, both monomers (i.e., monomer 1 and monomer 2) of the heterodimeric Fc backbone pairs independently include one or more amino acid substitutions conferring an increase serum half-life. In such an instance, the pair of heterodimeric Fc backbones may be referred to as a symmetric, Xtend heterodimeric Fc backbone pair. As used herein, the terms “asymmetric” and “symmetric” are not intended to mean that the heterodimeric Fc backbone pairs comprise identical mutations, but rather that only one Fc domain (in the case of asymmetric pairs) or both Fc domains (in the case of symmetric pairs) contains amino acid variants conferring an increased serum half-life. In some instances, monomer 1 and monomer 2 can contain identical amino acid substitutions. In other instances, monomer 1 and monomer 2 can contain at least one amino acid substitution that is the same (e.g., both monomers contain the M428L substitution, one monomer further contains the N434S substitution, and the other monomer contains the N434A mutation). In some instances, monomer 1 and monomer 2 can contain amino acid substitutions that are unique to each monomer (e.g., N434S on one monomer, and N434A on the other monomer). In some embodiments, the heterodimeric Fc backbone pairs have increased serum half-life, including, but not limited to, those pairs of Fc backbones shown in the Figures.

[0372] In some embodiments, one or both of the Fc domains comprising the heterodimeric Fc backbone pairs include amino acid substitutions such that one or both of the Fc domains have increased ADCC activity and improved serum half-life. In certain embodiments, the amino acid substitutions include: (i) one or more of amino acid substitutions selected from the group including: S239D, I332E, and S239D/I332E, or any of the Fc ADCC variants shown in FIG. 4, and (ii) one or more amino acid substitutions selected from the group including: M252Y/S254T/T256E, M428L, N434S, N434A, M428L/N434S, and M428L/N434A. In some instances, only monomer 1 or monomer 2 of the heterodimeric Fc backbone pairs include amino acid substitutions resulting in increased ADCC and increased serum half-life. In such an instance, the pair of heterodimeric Fc backbones may be referred to as an asymmetric, ADCC-enhanced heterodimeric Fc backbone pair with Xtend. In other instances, both monomers (i.e., monomer 1 and monomer 2) of the heterodimeric Fc backbone pairs independently comprise amino acid substitutions resulting in increased ADCC and increased serum half-life. In such an instance, the pair of heterodimeric Fc backbones may be referred to as a symmetric, ADCC-enhanced heterodimeric Fc backbone pair with Xtend. As used herein, the terms “asymmetric” and “symmetric” are not intended to mean that the heterodimeric Fc backbone pairs comprise identical mutations, but rather that only one Fc domain (in the case of asymmetric pairs) or both Fc domains (in the case of symmetric pairs) contains amino acid variants conferring an increase in ADCC activity and improved serum half-life. In some instances, monomer 1 and monomer 2 can contain identical amino acid substitutions. In other instances, monomer 1 and monomer 2 can contain at least one amino acid substitution that is the same. In still other instances, monomer 1 and monomer 2 can contain amino acid substitutions that are unique to each monomer. In some embodiments, the heterodimeric Fc backbone pairs have increased ADCC activity and increased serum-half-life, including, but not limited to, those pairs of: (i) SEQ ID NOs: 1850 and 1851, (ii) SEQ ID NOs: 1852 and 1853, (iii) SEQ ID NOs: 1854 and 1855, (iv) SEQ ID NOs: 1856 and 1857, (v) SEQ ID NOs: 1858 and 1859, (vi) SEQ ID NOs: 1860 and 1861, (vii) SEQ ID NOs: 1862 and 1863, (viii) SEQ ID NOs: 1864 and 1865, (ix) SEQ ID NOs: 1866 and 1867, (x) SEQ ID NOs: 1868 and 1869, (xi) SEQ ID NOs: 1870 and 1871, (xii) SEQ ID NOs: 1872 and 1873, (xiii) SEQ ID NOs: 1874 and 1875, (xiv) SEQ ID NOs: 1876 and 1877, and (xv) SEQ ID NOs: 1878 and 1879, as shown in FIGS. 33A-33D.

[0373] In some embodiments, one or both of the Fc domains comprising the heterodimeric Fc backbone pairs include amino acid substitutions such that one or both of the Fc domains have an ablated FcγR function. Nonlimiting examples of amino acid substitutions (and combinations thereof) conferring an ablated FcγR function are shown in, for example, FIG. 3. In some instances, only monomer 1 or monomer 2 of the heterodimeric Fc backbone pairs include amino acid substitutions that result in an ablated FcγR function (see, e.g., FIG. 3). In such an instance, the pair of heterodimeric Fc backbones may be referred to as an asymmetric, FcKO heterodimeric Fc backbone pair. In other instances, both monomers (i.e., monomer 1 and monomer 2) of the heterodimeric Fc backbone pairs independently comprise one or more amino acid substitutions resulting in an ablated FcγR function (see, e.g., FIG. 3). In such an instance, the pair of heterodimeric Fc backbones may be referred to as a symmetric, FcKO heterodimeric Fc backbone pair. As used herein, the terms “asymmetric” and “symmetric” are not intended to mean that the heterodimeric Fc backbone pairs comprise identical mutations, but rather that only one Fc domain (in the case of asymmetric pairs) or both Fc domains (in the case of symmetric pairs) contains amino acid variants resulting in an ablated FcγR function. In some embodiments, the heterodimeric Fc backbone pairs have ablated FcγR function, including, but not limited to, those pairs of: (i) SEQ ID NOs: 1880 and 1881, (ii) SEQ ID NOs: 1882 and 1883, (iii) SEQ ID NOs: 1884 and 1885, (iv) SEQ ID NOs: 1886 and 1887, (v) SEQ ID NOs: 1888 and 1889, (vi) SEQ ID NOs: 1890 and 1891, (vii) SEQ ID NOs: 1892 and 1893, (viii) SEQ ID NOs: 1894 and 1895, (ix) SEQ ID NOs: 1896 and 1897, (x) SEQ ID NOs: 1898 and 1899, (xi) SEQ ID NOs: 1900 and 1901, (xii) SEQ ID NOs: 1902 and 1903, (xiii) SEQ ID NOs: 1904 and 1905, (xiv) SEQ ID NOs: 1906 and 1907, (xv) SEQ ID NOs: 1908 and 1909, (xvi) SEQ ID NOs: 1910 and 1911, (xvii) SEQ ID NOs: 1912 and 1913, (xviii) SEQ ID NOs: 1914 and 1915, (xix) SEQ ID NOs: 1916 and 1917, (xx) SEQ ID NOs: 1918 and 1919, (xxi) SEQ ID NOs: 1920 and 1921, (xxii) SEQ ID NOs: 1922 and 1923, (xxiii) SEQ ID NOs: 1924 and 1925, (xxiv) SEQ ID NOs: 1926 and 1927, (xxv) SEQ ID NOs: 1928 and 1929, (xxvi) SEQ ID NOs: 1930 and 1931, and (xxvii) SEQ ID NOs: 1932 and 1933, as shown in FIGS. 34 and 35.

[0374] Further, FIG. 41 provides useful C_{L} sequences that can be used with this format (see, e.g., SEQ ID NOs: 1969 and 1970).

[0375] In some embodiments, any of the V_{H} and V_{L} sequences depicted herein (including all V_{H} and V_{L} sequences depicted in the Figures and sequence listing, including those directed to NK cell antigens) can be added to the bottle opener backbone formats of the Figures as the “Fab side,” using any of the anti-NK cell antigen scFv sequences shown in the Figures and sequence listing. Alternatively, any of the V_{H} and V_{L} sequences depicted herein (including all V_{H} and V_{L} sequences depicted in the Figures and sequence listing, including those directed to TTAs) can be added to the bottle opener backbone formats of the Figures as the “Fab side,” using any of the anti-TTA scFv sequences shown in the Figures and sequence listing.

[0376] 2. 2+1 Fab₂-scFv-Fc Format

[0377] One heterodimeric scaffold that finds particular use in the antibodies described herein is the “2+1 Fab₂-scFv-Fc” format (also referred to in previous related filings as the “central-scFv” or “2+1 Fab×Fab-scFv” format), as is shown in FIG. 8B. In this embodiment, the format relies on the use of an inserted scFv domain thus forming a third antigen binding domain, wherein the Fab portions of the two monomers bind TTAs and the “extra” scFv domain binds a NK cell antigen. The scFv domain is inserted between the Fc domain and the CH1-Fv region of one of the monomers, thus providing the third antigen binding domain. As described, αNK cell antigen×αTTA bispecific antibodies having the 2+1 Fab₂-scFv-Fc format may be potent in inducing redirected T cell cytotoxicity in cellular environments that express low levels of a TTA. Such antibodies may exhibit differences in selectivity for cells with different TTA expression, potencies for TTA expressing cells, ability to elicit cytokine release, and sensitivity to soluble the TTA. These TTA antibodies find use, for example, in the treatment of TTA-associated cancers. In some embodiments, the heterodimeric antibody of this format is bivalent for the NK cell antigen and monovalent for the TTA antigen.

[0378] In this embodiment, one monomer comprises a first heavy chain comprising a first variable heavy domain, a CH1 domain (and optional hinge) and Fc domain, with a scFv comprising a scFv variable light domain, an scFv linker and a scFv variable heavy domain. The scFv is covalently attached between the C-terminus of the CH1 domain of the heavy constant domain and the N-terminus of the first Fc domain using optional domain linkers (VH1-CH1-[optional linker]-VH2-scFv linker-VL2-[optional linker]-CH2-CH3, or the opposite orientation for the scFv, VH1-CH1-[optional linker]-VL2-scFv linker-VH2-[optional linker including the hinge]-CH2-CH3). The optional linkers can be any suitable peptide linkers, including, for example, the domain linkers included in FIGS. 6 and 7 (see, e.g., SEQ ID NOs: 30, 31, 40, 41, 50, 51, and 94-119). In some embodiments, the optional linker is a hinge or a fragment thereof. The other monomer is a standard Fab side (i.e., VH1-CH1-hinge-CH2-CH3). This embodiment further utilizes a common light chain comprising a variable light domain and a constant light domain, that associates with the heavy chains to form two identical Fabs that bind TTAs. As for many of the embodiments herein, these constructs include skew variants, pI variants, ablation variants, additional Fc variants, etc. as desired and described herein (see, e.g., FIGS. 1-4).

[0379] In one embodiment, the 2+1 Fab₂-scFv-Fc format antibody includes an scFv with the V_{H} and V_{L} of a NK cell antigen binding domain sequence depicted in the Figures, or a variant thereof. In one embodiment, the 2+1 Fab₂-scFv-Fc format includes two Fabs having the V_{H} and V_{L} of a TTA binding domain as depicted in the Figures, or a variant thereof.

[0380] In exemplary embodiments, the TTA binding domain of the 2+1 Fab₂-scFv-Fc anti-NK cell antigen x anti-TTA bispecific antibody includes the V_{H} and V_{L} NK cell antigen binding domain sequences finding particular use in these embodiments include, but are not limited to, those shown in the Figures, or a variant thereof. Any suitable TTA ABD can be included in the 2+1 Fab₂-scFv-Fc format antibody, included those provided herein. TTA ABDs that are of particular use in these embodiments include, but are not limited to, V_{H} and V_{L} domains selected from the group including those shown in the Figures, or variants thereof.

[0381] In addition, the Fc domains of the antibodies described herein generally include one or more of: (a) Fc ADCC variants (see, e.g., FIG. 4), (b) skew variants (see, e.g., FIGS. 1A-1F; with particularly useful skew variants being selected from the group including: (i) S364K/E357Q:L368D/K370S, (ii) L368D/K370S:S364K, (iii) L368E/K370S:S364K, (iv) T411E/K360E/Q362E:D401K, (v) L368D/K370S:S364K/E357L, (vi) K370S:S364K/E357Q, (vii) T366S/L368A/Y407V:T366W, and (viii) T366S/L368A/Y407V/Y349C:T366W/S354C), (c) optionally ablation variants (see, e.g., FIG. 3), (d) optionally charged scFv linkers (including those shown in FIG. 5; see, e.g., SEQ ID NOs: 1-11, 20, 21, and 81-92), and the heavy chain can comprise pI variants (including, but not limited to, those shown in FIGS. 1 and 2).

[0382] In some embodiments, the 2+1 Fab₂-scFv-Fc format antibody includes Fc ADCC variants (see, e.g., FIG. 4), skew variants (see, e.g., FIGS. 1A-1F), and/or pI variants (see, e.g., FIGS. 1 and 2). Accordingly, some embodiments include 2+1 Fab₂-scFv-Fc formats that comprise: (i) a first monomer (the “Fab-scFv-Fc” monomer) that comprises the Fc ADCC variants S239D/I332E, the skew variants S364K/E357Q, and a variable heavy domain that, with the variable light domain of the common light chain, makes up an Fv that binds to a TTA as outlined herein, and an scFv domain that binds to a NK cell antigen, (ii) a second monomer (the “Fab-Fc” monomer) that comprises the skew variants L368D/K370S, the pI variants N208D/Q295E/N384D/Q418E/N421D, and a variable heavy domain that, with variable light domain of the common light chain, makes up an Fv that binds to a TTA as outlined herein, and (iii) a common light chain comprising the variable light domain and a constant light domain, where numbering is according to EU numbering. Further, bispecific antibodies in the 2+1 Fab₂-scFv-Fc format can also include one or more Fc domains with one or more ablation variants (see, e.g., FIG. 3). NK cell antigen binding domain sequences finding particular use in these embodiments include, but are not limited to, those shown in the Figures, or variants thereof. TTA binding domain sequences finding particular use in these embodiments include, but are not limited to, those shown in the Figures, or variants thereof.

[0383] In some embodiments, the 2+1 Fab₂-scFv-Fc format antibody includes Fc ADCC variants (see, e.g., FIG. 4), skew variants (see, e.g., FIGS. 1A-1F), pI variants (see, e.g., FIGS. 1 and 2), and/or FcRn variants (e.g., M428L, N434S, N434A, M428L/N434S, M428L/N434A, M252Y/S254T/T256E, etc.). Accordingly, some embodiments include 2+1 Fab₂-scFv-Fc formats that comprise: (i) a first monomer (the “Fab-scFv-Fc” monomer) that comprises the Fc ADCC variants S239D/I332E, the skew variants S364K/E357Q, the FcRn variants M428L/N434S, and a variable heavy domain that, with the variable light domain of the common light chain, makes up an Fv that binds to a TTA as outlined herein, and an scFv domain that binds to a NK cell antigen, (ii) a second monomer (the “Fab-Fc” monomer) that comprises the skew variants L368D/K370S, the pI variants N208D/Q295E/N384D/Q418E/N421D, the FcRn variants M428L/N434S, and a variable heavy domain that, with variable light domain of the common light chain, makes up an Fv that binds to a TTA as outlined herein, and (iii) a common light chain comprising the variable light domain and a constant light domain, where numbering is according to EU numbering. Further, bispecific antibodies in the 2+1 Fab₂-scFv-Fc format can also include one or more Fc domains with one or more ablation variants (see, e.g., FIG. 3). NK cell antigen binding domain sequences finding particular use in these embodiments include, but are not limited to, those shown in the Figures, or variants thereof. TTA binding domain sequences finding particular use in these embodiments include, but are not limited to, those shown in the Figures, or variants thereof.

[0384] FIGS. 36A-36C show some exemplary Fc domain sequences that are useful with the 2+1 Fab₂-scFv-Fc format. Generally, the “monomer 1” sequences (as depicted in the Figures) refer to the Fc domain of the “Fab-Fc heavy chain,” and the “monomer 2” sequences (as depicted in the Figures) refer to the Fc domain of the “Fab-scFv-Fc heavy chain.” In some embodiments, the heterodimeric Fc backbone pairs are those pairs of: (i) SEQ ID NOs: 1934 and 1935, (ii) SEQ ID NOs: 1936 and 1937, (iii) SEQ ID NOs: 1938 and 1939, (iv) SEQ ID NOs: 1940 and 1941, (v) SEQ ID NOs: 1942 and 1943, (vi) SEQ ID NOs: 1944 and 1945, (vii) SEQ ID NOs: 1946 and 1947, (viii) SEQ ID NOs: 1948 and 1949, and (ix) SEQ ID NOs: 1950 and 1951, as shown in FIGS. 36A-36C.

[0385] In some embodiments, one or both of the Fc domains comprising the heterodimeric Fc backbone pairs are configured such that one or both of the Fc domains have wildtype FcγR effector function. In some embodiments, the heterodimeric Fc backbone pairs have wildtype FcγR effector function, including, but not limited to, those pairs of Fc backbones shown in the Figures.

[0386] In some embodiments, one or both of the Fc domains comprising the heterodimeric Fc backbone pairs include amino acid substitutions such that one or both of the Fc domains have increased ADCC activity. In certain embodiments, the amino acid substitutions include one or more of: S239D, I332E, or S239D/I332E, or any of the Fc ADCC variants shown in FIG. 4. In some instances, only monomer 1 or monomer 2 of the heterodimeric Fc backbone pairs include amino acid substitutions resulting in increased ADCC activity. In such an instance, the pair of heterodimeric Fc backbones may be referred to as an asymmetric, ADCC-enhanced heterodimeric Fc backbone pair. In other instances, both monomers (i.e., monomer 1 and monomer 2) of the heterodimeric Fc backbone pairs independently include one or more amino acid substitutions conferring an increased ADCC activity. In such an instance, the pair of heterodimeric Fc backbones may be referred to as a symmetric, ADCC-enhanced heterodimeric Fc backbone pair. As used herein, the terms “asymmetric” and “symmetric” are not intended to mean that the heterodimeric Fc backbone pairs comprise identical mutations, but rather that only one Fc domain (in the case of asymmetric pairs) or both Fc domains (in the case of symmetric pairs) includes amino acid variants conferring an increase in ADCC activity. In some instances, monomer 1 and monomer 2 can contain identical amino acid substitutions (e.g., both monomers contain a S239D substitution, an I332E substitution, or both substitutions are present on both monomers). In other instances, monomer 1 and monomer 2 can contain at least one amino acid substitution that is the same (e.g., monomer 1 may contain the S239D/I332E substitutions, and monomer 2 contains the S239D substitution and is WT with respect to the 332 residue (or the reverse where monomer 2 is WT with respect to the 239 residue and contains the I332E substitution); monomer 2 may contain the S239D/I332E substitutions, and monomer 1 contains the S239D substitution and is WT with respect to the 332 residue (or the reverse where monomer 1 is WT with respect to the 239 residue and contains the I332E substitution); etc.). In still other instances, monomer 1 and monomer 2 can contain amino acid substitutions that are unique to each monomer (e.g., S239D on monomer 1 and I332E on monomer 2, or the reverse). In some embodiments, the heterodimeric Fc backbone pairs have increased ADCC activity, including, but not limited to, those pairs of Fc backbones shown in the Figures.

[0387] In some embodiments, one or both of the Fc domains comprising the heterodimeric Fc backbone pairs include amino acid substitutions such that one or both of the Fc domains have improved serum half-life. In certain embodiments, the amino acid substitutions include one or more of: M252Y/S254T/T256E, M428L, N434S, N434A, M428L/N434S, or M428L/N434A. In some instances, only monomer 1 or monomer 2 of the heterodimeric Fc backbone pairs include amino acid substitutions resulting in improved serum half-life. In such an instance, the pair of heterodimeric Fc backbones may be referred to as an asymmetric, Xtend heterodimeric Fc backbone pair. In other instances, both monomers (i.e., monomer 1 and monomer 2) of the heterodimeric Fc backbone pairs independently include one or more amino acid substitutions conferring an increase serum half-life. In such an instance, the pair of heterodimeric Fc backbones may be referred to as a symmetric, Xtend heterodimeric Fc backbone pair. As used herein, the terms “asymmetric” and “symmetric” are not intended to mean that the heterodimeric Fc backbone pairs comprise identical mutations, but rather that only one Fc domain (in the case of asymmetric pairs) or both Fc domains (in the case of symmetric pairs) contains amino acid variants conferring an increased serum half-life. In some instances, monomer 1 and monomer 2 can contain identical amino acid substitutions. In other instances, monomer 1 and monomer 2 can contain at least one amino acid substitution that is the same (e.g., both monomers contain the M428L substitution, one monomer further contains the N434S substitution, and the other monomer contains the N434A mutation). In some instances, monomer 1 and monomer 2 can contain amino acid substitutions that are unique to each monomer (e.g., N434S on one monomer, and N434A on the other monomer). In some embodiments, the heterodimeric Fc backbone pairs have increased serum half-life, including, but not limited to, those pairs of Fc backbones shown in the Figures.

[0388] In some embodiments, one or both of the Fc domains comprising the heterodimeric Fc backbone pairs include amino acid substitutions such that one or both of the Fc domains have increased ADCC activity and improved serum half-life. In certain embodiments, the amino acid substitutions include: (i) one or more of amino acid substitutions selected from the group including: S239D, I332E, and S239D/I332E, or any of the Fc ADCC variants shown in FIG. 4, and (ii) one or more amino acid substitutions selected from the group including: M252Y/S254T/T256E, M428L, N434S, N434A, M428L/N434S, and M428L/N434A. In some instances, only monomer 1 or monomer 2 of the heterodimeric Fc backbone pairs include amino acid substitutions resulting in increased ADCC and increased serum half-life. In such an instance, the pair of heterodimeric Fc backbones may be referred to as an asymmetric, ADCC-enhanced heterodimeric Fc backbone pair with Xtend. In other instances, both monomers (i.e., monomer 1 and monomer 2) of the heterodimeric Fc backbone pairs independently comprise amino acid substitutions resulting in increased ADCC and increased serum half-life. In such an instance, the pair of heterodimeric Fc backbones may be referred to as a symmetric, ADCC-enhanced heterodimeric Fc backbone pair with Xtend. As used herein, the terms “asymmetric” and “symmetric” are not intended to mean that the heterodimeric Fc backbone pairs comprise identical mutations, but rather that only one Fc domain (in the case of asymmetric pairs) or both Fc domains (in the case of symmetric pairs) contains amino acid variants conferring an increase in ADCC activity and improved serum half-life. In some instances, monomer 1 and monomer 2 can contain identical amino acid substitutions. In other instances, monomer 1 and monomer 2 can contain at least one amino acid substitution that is the same. In still other instances, monomer 1 and monomer 2 can contain amino acid substitutions that are unique to each monomer. In some embodiments, the heterodimeric Fc backbone pairs have increased ADCC activity and increased serum-half-life, including, but not limited to, those pairs of Fc backbones shown in the Figures.

[0389] In some embodiments, one or both of the Fc domains comprising the heterodimeric Fc backbone pairs include amino acid substitutions such that one or both of the Fc domains have an ablated FcγR function. Nonlimiting examples of amino acid substitutions (and combinations thereof) conferring an ablated FcγR function are shown in, for example, FIG. 3. In some instances, only monomer 1 or monomer 2 of the heterodimeric Fc backbone pairs include amino acid substitutions that result in an ablated FcγR function (see, e.g., FIG. 3). In such an instance, the pair of heterodimeric Fc backbones may be referred to as an asymmetric, FcKO heterodimeric Fc backbone pair. In other instances, both monomers (i.e., monomer 1 and monomer 2) of the heterodimeric Fc backbone pairs independently comprise one or more amino acid substitutions resulting in an ablated FcγR function (see, e.g., FIG. 3). In such an instance, the pair of heterodimeric Fc backbones may be referred to as a symmetric, FcKO heterodimeric Fc backbone pair. As used herein, the terms “asymmetric” and “symmetric” are not intended to mean that the heterodimeric Fc backbone pairs comprise identical mutations, but rather that only one Fc domain (in the case of asymmetric pairs) or both Fc domains (in the case of symmetric pairs) contains amino acid variants resulting in an ablated FcγR function. In some embodiments, the heterodimeric Fc backbone pairs have ablated FcγR function, including, but not limited to, those pairs of Fc backbones shown in the Figures.

[0390] Further, FIG. 41 provides useful C_{L} sequences that can be used with this format (see, e.g., SEQ ID NOs: 1969 and 1970).

[0391] 3. mAb-scFv Format

[0392] One heterodimeric scaffold that finds particular use in the antibodies described herein is the “mAb-scFv” (or “2+1 mAb-scFv”) format, as is shown in FIG. 8E. In this embodiment, the format relies on the use of a C-terminal attachment of a scFv to one of the monomers, thus forming a third ABD, wherein the Fab portions of the two monomers bind a TTA and the “extra” scFv domain binds a NK cell antigen. Thus, the first monomer comprises a first heavy chain (comprising a variable heavy domain and a constant domain), with a C-terminally covalently attached scFv comprising a scFv variable light domain, an scFv linker and a scFv variable heavy domain in either orientation (VH1-CH1-hinge-CH2-CH3-[optional linker]-VH2-scFv linker-VL2 or VH1-CH1-hinge-CH2-CH3-[optional linker]-VL2-scFv linker-VH2). This embodiment further utilizes a common light chain comprising a variable light domain and a constant light domain, that associates with the heavy chains to form two identical Fabs that bind a TTA. In some embodiments, an exemplary mAb-scFv format includes: (i) a first Fc comprising an N-terminal Fab arm that binds a TTA, (ii) a second Fc comprising an N-terminal Fab arm that binds a TTA, and (iii) a C-terminal scFv that binds a NK cell antigen. Such a format can include a first monomer comprising, from the N-terminus to the C-terminus, VH1-CH1-hinge-CH2-CH3, a second monomer comprising, from the N-terminus to the C-terminus, VH1-CH1-hinge-CH2-CH3-scFv, and a third monomer comprising, from the N-terminus to the C-terminus, V_{L}-C_{L}, wherein the first VH1-V_{L} pair bind a TTA, the second VH1-V_{L} pair bind a TTA, and the scFv binds a NK cell antigen. In another embodiment of the mAb-scFv, the first and second VH1-V_{L} pairs bind a NK cell antigen and the scFv binds a TTA. In some embodiments, the heterodimeric antibody of this format is bivalent for the NK cell antigen and monovalent for the TTA antigen. As for many of the embodiments herein, these constructs include Fc ADCC variants, skew variants, pI variants, FcRn variants, ablation variants, additional Fc variants, etc. as desired and described herein. In some embodiments, the heterodimeric antibody of this format is bivalent for the NK cell antigen and monovalent for the TTA antigen.

[0393] The antibodies described herein provide mAb-scFv formats, where the NK cell antigen domain sequences comprise variable heavy and variable light domains selected from the group including the variable heavy and variable light domains shown in the Figures, or a variant thereof; and the TTA binding domain sequences comprise variable heavy and variable light domains selected from the group including the variable heavy and variable light domains shown in the Figures, or a variant thereof. In particular embodiments, the αNK cell antigen V_{H} and V_{L} binding domain sequences are selected from the group including the V_{H} and V_{L} binding domain sequences shown in the Figures, or a variant thereof. In particular embodiments, the αTTA V_{H}/V_{L} pairs are selected from the group including the V_{H}/V_{L} pairs shown in the Figures, or a variant thereof.

[0394] In some embodiments, the mAb-scFv format includes one or more of: (a) Fc ADCC variants (see, e.g., FIG. 4), (b) skew variants (see, e.g., FIGS. 1A-1F), and/or pI variants (see, e.g., FIGS. 1 and 2). Accordingly, some embodiments include mAb-scFv formats that comprise: (i) a first monomer that comprises the Fc ADCC variants S239D/I332E, the skew variants S364K/E357Q, and a variable heavy domain that, with the variable light domain of the common light chain, makes up an Fv that binds to a TTA as outlined herein, and a scFv domain that binds to a NK cell antigen, (ii) a second monomer that comprises the skew variants L368D/K370S, the pI variants N208D/Q295E/N384D/Q418E/N421D, and a variable heavy domain that, with the variable light domain of the common light chain, makes up an Fv that binds to a TTA as outlined herein, and (iii) a common light chain comprising a variable light domain and a constant light domain. Further, bispecific antibodies in the mAb-scFv format can also include one or more Fc domains with one or more ablation variants (see, e.g., FIG. 3). NK cell antigen binding domain sequences finding particular use in these embodiments include, but are not limited to, those shown in the Figures, or variants thereof. TTA binding domain sequences finding particular use in these embodiments include, but are not limited to, those shown in the Figures, or variants thereof.

[0395] In some embodiments, the mAb-scFv format includes Fc ADCC variants (see, e.g., FIG. 4), skew variants (see, e.g., FIGS. 1A-1F), pI variants (see, e.g., FIGS. 1 and 2), and/or FcRn variants (e.g., M252Y/S254T/T256E, M428L, N434S, N434A, M428L/N434S, M428L/N434A, etc.). Accordingly, some embodiments include mAb-scFv formats that comprise: (i) a first monomer that comprises the Fc ADCC variants S239D/I332E, the skew variants S364K/E357Q, the FcRn variants M428L/N434S, and a variable heavy domain that, with the variable light domain of the common light chain, makes up an Fv that binds to B7H3 as outlined herein, and a scFv domain that binds to MICA/B, (ii) a second monomer that comprises the skew variants L368D/K370S, the pI variants N208D/Q295E/N384D/Q418E/N421D, the FcRn variants M428L/N434S, and a variable heavy domain that, with the variable light domain of the common light chain, makes up an Fv that binds to B7H3 as outlined herein, and (iii) a common light chain comprising a variable light domain and a constant light domain. Further, bispecific antibodies in the mAb-scFv format can also include one or more Fc domains with one or more ablation variants (see, e.g., FIG. 3). NK cell antigen binding domain sequences finding particular use in these embodiments include, but are not limited to, those shown in the Figures, or variants thereof. TTA binding domain sequences finding particular use in these embodiments include, but are not limited to, those shown in the Figures, or variants thereof.

[0396] FIGS. 43A-43G show some exemplary Fc domain sequences that are useful with the mAb-scFv format. Generally, the “monomer 1” sequences (as depicted in the Figures) refer to the Fc domain of the “Fab-Fc heavy chain,” and the “monomer 2” sequences (as depicted in the Figures) refer to the Fc domain of the “Fab-Fc-scFv heavy chain.”

[0397] In some embodiments, one or both of the Fc domains comprising the heterodimeric Fc backbone pairs are configured such that one or both of the Fc domains have wildtype FcγR effector function. In some embodiments, the heterodimeric Fc backbone pairs have wildtype FcγR effector function, including, but not limited to, those pairs of: SEQ ID NOs: 1798 and 1975, as shown in FIG. 43A.

[0398] In some embodiments, one or both of the Fc domains comprising the heterodimeric Fc backbone pairs include amino acid substitutions such that one or both of the Fc domains have increased ADCC activity. In certain embodiments, the amino acid substitutions include one or more of: S239D, I332E, or S239D/I332E, or any of the Fc ADCC variants shown in FIG. 4. In some instances, only monomer 1 or monomer 2 of the heterodimeric Fc backbone pairs include amino acid substitutions resulting in increased ADCC activity. In such an instance, the pair of heterodimeric Fc backbones may be referred to as an asymmetric, ADCC-enhanced heterodimeric Fc backbone pair. In other instances, both monomers (i.e., monomer 1 and monomer 2) of the heterodimeric Fc backbone pairs independently include one or more amino acid substitutions conferring an increased ADCC activity. In such an instance, the pair of heterodimeric Fc backbones may be referred to as a symmetric, ADCC-enhanced heterodimeric Fc backbone pair. As used herein, the terms “asymmetric” and “symmetric” are not intended to mean that the heterodimeric Fc backbone pairs comprise identical mutations, but rather that only one Fc domain (in the case of asymmetric pairs) or both Fc domains (in the case of symmetric pairs) includes amino acid variants conferring an increase in ADCC activity. In some instances, monomer 1 and monomer 2 can contain identical amino acid substitutions (e.g., both monomers contain a S239D substitution, an I332E substitution, or both substitutions are present on both monomers). In other instances, monomer 1 and monomer 2 can contain at least one amino acid substitution that is the same (e.g., monomer 1 may contain the S239D/I332E substitutions, and monomer 2 contains the S239D substitution and is WT with respect to the 332 residue (or the reverse where monomer 2 is WT with respect to the 239 residue and contains the I332E substitution); monomer 2 may contain the S239D/I332E substitutions, and monomer 1 contains the S239D substitution and is WT with respect to the 332 residue (or the reverse where monomer 1 is WT with respect to the 239 residue and contains the I332E substitution); etc.). In still other instances, monomer 1 and monomer 2 can contain amino acid substitutions that are unique to each monomer (e.g., S239D on monomer 1 and I332E on monomer 2, or the reverse). In some embodiments, the heterodimeric Fc backbone pairs have increased ADCC activity, including, but not limited to, those pairs of: (i) SEQ ID NOs: 1820 and 1976, (ii) SEQ ID NOs: 1822 and 1977, (iii) SEQ ID NOs: 1824 and 1978, (iv) SEQ ID NOs: 1826 and 1979, (v) SEQ ID NOs: 1828 and 1980, (vi) SEQ ID NOs: 1830 and 1981, (vii) SEQ ID NOs: 1832 and 1982, (viii) SEQ ID NOs: 1834 and 1983, (ix) SEQ ID NOs: 1836 and 1984, (x) SEQ ID NOs: 1838 and 1985, (xi) SEQ ID NOs: 1840 and 1986, (xii) SEQ ID NOs: 1842 and 1987, (xiii) SEQ ID NOs: 1844 and 1988, (xiv) SEQ ID NOs: 1846 and 1989, and (xv) SEQ ID NOs: 1848 and 1990, as shown in FIGS. 43A-43D.

[0399] In some embodiments, one or both of the Fc domains comprising the heterodimeric Fc backbone pairs include amino acid substitutions such that one or both of the Fc domains have improved serum half-life. In certain embodiments, the amino acid substitutions include one or more of: M252Y/S254T/T256E, M428L, N434S, N434A, M428L/N434S, or M428L/N434A. In some instances, only monomer 1 or monomer 2 of the heterodimeric Fc backbone pairs include amino acid substitutions resulting in improved serum half-life. In such an instance, the pair of heterodimeric Fc backbones may be referred to as an asymmetric, Xtend heterodimeric Fc backbone pair. In other instances, both monomers (i.e., monomer 1 and monomer 2) of the heterodimeric Fc backbone pairs independently include one or more amino acid substitutions conferring an increase serum half-life. In such an instance, the pair of heterodimeric Fc backbones may be referred to as a symmetric, Xtend heterodimeric Fc backbone pair. As used herein, the terms “asymmetric” and “symmetric” are not intended to mean that the heterodimeric Fc backbone pairs comprise identical mutations, but rather that only one Fc domain (in the case of asymmetric pairs) or both Fc domains (in the case of symmetric pairs) contains amino acid variants conferring an increased serum half-life. In some instances, monomer 1 and monomer 2 can contain identical amino acid substitutions. In other instances, monomer 1 and monomer 2 can contain at least one amino acid substitution that is the same (e.g., both monomers contain the M428L substitution, one monomer further contains the N434S substitution, and the other monomer contains the N434A mutation). In some instances, monomer 1 and monomer 2 can contain amino acid substitutions that are unique to each monomer (e.g., N434S on one monomer, and N434A on the other monomer). In some embodiments, the heterodimeric Fc backbone pairs have increased serum half-life, including, but not limited to, those pairs of Fc backbones shown in the Figures.

[0400] In some embodiments, one or both of the Fc domains comprising the heterodimeric Fc backbone pairs include amino acid substitutions such that one or both of the Fc domains have increased ADCC activity and improved serum half-life. In certain embodiments, the amino acid substitutions include: (i) one or more of amino acid substitutions selected from the group including: S239D, I332E, and S239D/I332E, or any of the Fc ADCC variants shown in FIG. 4, and (ii) one or more amino acid substitutions selected from the group including: M252Y/S254T/T256E, M428L, N434S, N434A, M428L/N434S, and M428L/N434A. In some instances, only monomer 1 or monomer 2 of the heterodimeric Fc backbone pairs include amino acid substitutions resulting in increased ADCC and increased serum half-life. In such an instance, the pair of heterodimeric Fc backbones may be referred to as an asymmetric, ADCC-enhanced heterodimeric Fc backbone pair with Xtend. In other instances, both monomers (i.e., monomer 1 and monomer 2) of the heterodimeric Fc backbone pairs independently comprise amino acid substitutions resulting in increased ADCC and increased serum half-life. In such an instance, the pair of heterodimeric Fc backbones may be referred to as a symmetric, ADCC-enhanced heterodimeric Fc backbone pair with Xtend. As used herein, the terms “asymmetric” and “symmetric” are not intended to mean that the heterodimeric Fc backbone pairs comprise identical mutations, but rather that only one Fc domain (in the case of asymmetric pairs) or both Fc domains (in the case of symmetric pairs) contains amino acid variants conferring an increase in ADCC activity and improved serum half-life. In some instances, monomer 1 and monomer 2 can contain identical amino acid substitutions. In other instances, monomer 1 and monomer 2 can contain at least one amino acid substitution that is the same. In still other instances, monomer 1 and monomer 2 can contain amino acid substitutions that are unique to each monomer. In some embodiments, the heterodimeric Fc backbone pairs have increased ADCC activity and increased serum-half-life, including, but not limited to, those pairs of: (i) SEQ ID NOs: 1850 and 1991, (ii) SEQ ID NOs: 1852 and 1992, (iii) SEQ ID NOs: 1854 and 1993, (iv) SEQ ID NOs: 1856 and 1994, (v) SEQ ID NOs: 1858 and 1995, (vi) SEQ ID NOs: 1860 and 1996, (vii) SEQ ID NOs: 1862 and 1997, (viii) SEQ ID NOs: 1864 and 1998, (ix) SEQ ID NOs: 1866 and 1999, (x) SEQ ID NOs: 1868 and 2000, (xi) SEQ ID NOs: 1870 and 2001, (xii) SEQ ID NOs: 1872 and 2002, (xiii) SEQ ID NOs: 1874 and 2003, (xiv) SEQ ID NOs: 1876 and 93, and (xv) SEQ ID NOs: 1878 and 80, as shown in FIGS. 43D-43G.

[0401] In some embodiments, one or both of the Fc domains comprising the heterodimeric Fc backbone pairs include amino acid substitutions such that one or both of the Fc domains have an ablated FcγR function. Nonlimiting examples of amino acid substitutions (and combinations thereof) conferring an ablated FcγR function are shown in, for example, FIG. 3. In some instances, only monomer 1 or monomer 2 of the heterodimeric Fc backbone pairs include amino acid substitutions that result in an ablated FcγR function (see, e.g., FIG. 3). In such an instance, the pair of heterodimeric Fc backbones may be referred to as an asymmetric, FcKO heterodimeric Fc backbone pair. In other instances, both monomers (i.e., monomer 1 and monomer 2) of the heterodimeric Fc backbone pairs independently comprise one or more amino acid substitutions resulting in an ablated FcγR function (see, e.g., FIG. 3). In such an instance, the pair of heterodimeric Fc backbones may be referred to as a symmetric, FcKO heterodimeric Fc backbone pair. As used herein, the terms “asymmetric” and “symmetric” are not intended to mean that the heterodimeric Fc backbone pairs comprise identical mutations, but rather that only one Fc domain (in the case of asymmetric pairs) or both Fc domains (in the case of symmetric pairs) contains amino acid variants resulting in an ablated FcγR function. In some embodiments, the heterodimeric Fc backbone pairs have ablated FcγR function, including, but not limited to, those pairs of: SEQ ID NOs: 1973 and 1974, as shown in FIG. 43A.

[0402] 4. 1+1 CLC Format

[0403] One heterodimeric scaffold that finds particular use in the antibodies described herein is the “1+1 common light chain” (or “1+1 CLC”) format, as is shown in FIG. 8C. The 1+1 CLC format antibody includes: a first monomer that includes a VH1-CH1-hinge-CH2-CH3, wherein VH1 is a first variable heavy domain and CH2-CH3 is a first Fc domain; a second monomer that includes a VH2-CH1-hinge-CH2-CH3, wherein VH2 is a second variable heavy domain and CH2-CH3 is a second Fc domain; and a third monomer “common light chain” comprising V_{L}-C_{L}, wherein V_{L} is a common variable light domain and C_{L} is a constant light domain. In such embodiments, the V_{L} pairs with the VH1 to form a first binding domain with a first antigen binding specificity; and the V_{L} pairs with the VH2 to form a second binding domain with a second antigen binding specificity. In some embodiments, the 1+1 CLC format antibody is a bivalent antibody.

[0404] In some embodiments, the first and/or second Fc domains of the 1+1 CLC format are variant Fc domains. Generally, variant Fc domains can comprise one or more of: (a) one or more Fc ADCC variants (see, e.g., FIG. 4), (b) one or more skew variants (see, e.g., FIGS. 1A-1F), (c) one or more ablation variants (see, e.g., FIG. 3), (d) one or more FcRn variants (e.g., M428L, N434S, N434A, M428L/N434S, M428L/N434A, M252Y/S254T/T256E, etc.), (e) a scFv linker (including those shown in FIG. 5; see, e.g., SEQ ID NOs: 1-11, 20, 21, and 81-92), and one or both of the heavy chains can comprise one or more pI variants (see, e.g., FIGS. 1 and 2). The various types of variants can be used alone, or in combination with other variant types described herein.

[0405] In some embodiments, one or both of the Fc domains are configured such that one or both of the Fc domains have wildtype FcγR effector function. In some embodiments, the heterodimeric Fc backbone pairs have wildtype FcγR effector function, including, but not limited to, those pairs of Fc backbones shown in the Figures.

[0406] In some embodiments, one or both of the Fc domains include one or more amino acid substitutions such that one or both of the Fc domains have increased ADCC activity. In certain embodiments, the amino acid substitutions include one or more of: S239D, I332E, or S239D/I332E, or any of the Fc ADCC variants shown in FIG. 4. In some instances, the Fc backbone pair comprises an asymmetric, ADCC-enhanced heterodimeric Fc backbone pair (as described above). In other embodiments, the Fc backbone pair comprises a symmetric, ADCC-enhanced heterodimeric Fc backbone pair (as described above). In some instances, monomer 1 and monomer 2 (of the heterodimeric Fc backbone pair) can contain identical amino acid substitutions. In other instances, monomer 1 and monomer 2 can contain at least one amino acid substitution that is the same. In still other instances, monomer 1 and monomer 2 can contain amino acid substitutions that are unique to each monomer. In some embodiments, the heterodimeric Fc backbone pairs have increased ADCC activity, including, but not limited to, those pairs of Fc backbones shown in the Figures. In some embodiments, one or both of the Fe domains include one or more amino acid substitutions such that one or both of the Fc domains have increased ADCC activity, and optionally one or more of: (i) one or more skew variants, (ii) one or more ablation variants, (iii) one or more variants that improve serum half-life, (iv) one or more pI variants in the constant domain of the first and/or second monomer, or (v) any combination thereof.

[0407] In some embodiments, one or both of the Fc domains include heterodimerization skew variants (e.g., a set of amino acid substitutions, including, but not limited to, those shown in FIGS. 1A-1F). Particularly useful heterodimerization skew variants include, but are not limited to: (i) S364K/E357Q: L368D/K370S, (ii) L368D/K370S: S364K, (iii) L368E/K370S: S364K, (iv) T411E/K360E/Q362E: D401K, (v) L368D/K370S: S364K/E357L, (vi) K370S: S364K/E357Q, (vii) T366S/L368A/Y407V: T366W, and (viii) T366S/L368A/Y407V/Y349C: T366W/S354C (according to EU numbering). In exemplary embodiments, one of the first or second variant Fc domains includes the heterodimerization skew variants L368D/K370S, and the other of the second or first variant Fc domain includes heterodimerization skew variants S364K/E357Q, wherein numbering is according to EU numbering. In some instances, the heterodimerization skew variants are only included on one of the two Fc domains. In such instances, the heterodimerization skew variants are in an asymmetric configuration. In some other instances, the heterodimerization skew variants are included on both of the Fc domains. In such instances, the heterodimerization skew variants are in a symmetric configuration. As used herein, the terms “asymmetric configuration” and “symmetric configuration” are not intended to mean that the heterodimeric Fc backbone pairs comprise identical heterodimerization skew variants, but rather that only one Fc domain (in the case of asymmetric configurations) or both Fc domains (in the case of symmetric configurations) includes heterodimerization skew variants. In some instances, monomer 1 and monomer 2 (of the heterodimeric Fc backbone pair) can contain identical amino acid substitutions. In other instances, monomer 1 and monomer 2 can contain at least one amino acid substitution that is the same. In still other instances, monomer 1 and monomer 2 can contain amino acid substitutions that are unique to each monomer. In some embodiments, one or both of the Fc domains include heterodimerization skew variants, and optionally one or more of: (i) one or more Fc ADCC variants, (ii) one or more ablation variants, (iii) one or more variants that improve serum half-life, (iv) one or more pI variants in the constant domain of the first and/or second monomer, or (v) any combination thereof.

[0408] In some embodiments, one or both of the Fc domains include one or more amino acid substitutions such that one or both of the Fc domains have improved serum half-life. In certain embodiments, the amino acid substitutions include one or more of: M252Y/S254T/T256E, M428L, N434S, N434A, M428L/N434S, or M428L/N434A. In some instances, the Fc backbone pair comprises an asymmetric, Xtend heterodimeric Fc backbone pair (as described above). In other embodiments, the Fc backbone pair comprises a symmetric, Xtend heterodimeric Fc backbone pair (as described above). In some instances, monomer 1 and monomer 2 (of the heterodimeric Fc backbone pair) can contain identical amino acid substitutions. In other instances, monomer 1 and monomer 2 can contain at least one amino acid substitution that is the same. In still other instances, monomer 1 and monomer 2 can contain amino acid substitutions that are unique to each monomer. In some embodiments, the heterodimeric Fc backbone pairs have increased serum half-life, including, but not limited to, those pairs of Fc backbones shown in the Figures. In some embodiments, one or both of the Fc domains include one or more amino acid substitutions such that one or both of the Fc domains have improved serum half-life, and optionally one or more of: (i) one or more skew variants, (ii) one or more ablation variants, (iii) one or more Fc ADCC variants, (iv) one or more pI variants in the constant domain of the first and/or second monomer, or (v) any combination thereof.

[0409] In some embodiments, one or both of the Fc domains include one or more amino acid substitutions such that one or both of the Fc domains have an ablated FcγR function. Nonlimiting examples of amino acid substitutions (and combinations thereof) conferring an ablated FcγR function are shown in, for example, FIG. 3. In some instances, the Fc backbone pair comprises an asymmetric FcKO heterodimeric Fc backbone pair (as described above). In other embodiments, the Fc backbone pair comprises a symmetric, FcKO heterodimeric Fc backbone pair (as described above). In some instances, monomer 1 and monomer 2 (of the heterodimeric Fc backbone pair) can contain identical amino acid substitutions. In other instances, monomer 1 and monomer 2 can contain at least one amino acid substitution that is the same. In still other instances, monomer 1 and monomer 2 can contain amino acid substitutions that are unique to each monomer. In some embodiments, the heterodimeric Fc backbone pairs have ablated FcγR function, including, but not limited to, those pairs of Fc backbones shown in the Figures. In some embodiments, each of the first and second Fc domains include the ablation variants E233P/L234V/L235A/G236_/S267K, wherein numbering is according to EU numbering. In some embodiments, one or both of the Fc domains include one or more amino acid substitutions such that one or both of the Fc domains have an ablated FcγR function, and optionally one or more of: (i) one or more skew variants, (ii) one or more Fc ADCC variants, (iii) one or more variants that improve serum half-life, (iv) one or more pI variants in the constant domain of the first and/or second monomer, or (v) any combination thereof.

[0410] In some embodiments, the constant domain (CH1-hinge-CH2-CH3) of the first and/or second monomer includes pI variants (including, but not limited to, those shown in FIGS. 1 and 2). In exemplary embodiments, the constant domain (CH1-hinge-CH2-CH3) of the first or second monomer includes pI variants N208D/Q295E/N384D/Q418E/N421D, wherein numbering is according to EU numbering. In some embodiments, the constant domain of the first and/or second monomer includes pI variants (including, but not limited to, those shown in FIGS. 1 and 2), and the first and/or second Fc domain optionally contains one or more of: (i) one or more skew variants, (ii) one or more ablation variants, (iii) one or more variants that improve serum half-life, (iv) one or more Fc ADCC variants, or (v) any combination thereof.

[0411] In some embodiments, one of the first or second antigen binding domains is a NK cell antigen binding domain. Any suitable NK cell antigen binding domain (as described herein and in the Figures, or a variant thereof) can be included in the subject 1+1 CLC format antibody.

[0412] In some embodiments, one of the first or second antigen binding domains is a TTA binding domain. Any suitable TTA binding domain (as described herein and in the Figures, or a variant thereof) can be included in the subject 1+1 CLC format antibody.

[0413] 5. 2+1 CLC Format

[0414] One heterodimeric scaffold that finds particular use in the antibodies described herein is the “2+1 common light chain” (or (“2+1 CLC”) format, as is shown in FIG. 8D. The 2+1 CLC format includes: a first monomer that includes a VH1-CH1-linker-VH1-CH1-hinge-CH2-CH3, wherein the first and second VH1 are each a first variable heavy domain and CH2-CH3 is a first Fc domain; a second monomer that includes a VH2-CH1-hinge-CH2-CH3, wherein VH2 is a second variable heavy domain and CH2-CH3 is a second Fc domain; and a third monomer that includes a “common light chain” V_{L}-C_{L}, wherein V_{L} is a common variable light domain and C_{L} is a constant light domain. The VL pairs with each of the VH1s of the first monomer to form two first binding domains, each with a first antigen binding specificity; and the VL pairs with the VH2 to form a second binding domain with a second antigen binding specificity. The linker of the first monomer can be any suitable linker, including, but not limited to, any one of the domain linkers described in FIGS. 6 and 7 (see, e.g., SEQ ID NOs: 30, 31, 40, 41, 50, 51, and 94-119). In some embodiments, the linker is EPKSCGKPGSGKPGS (SEQ ID NO: 115). In some embodiments, the 2+1 CLC format antibody is a trivalent antibody.

[0415] In some embodiments, the first and/or second Fc domains of the 2+1 CLC format are variant Fc domains. Generally, variant Fc domains can comprise one or more of: (a) one or more Fc ADCC variants (see, e.g., FIG. 4), (b) one or more skew variants (see, e.g., FIGS. 1A-1F), (c) one or more ablation variants (see, e.g., FIG. 3), (d) one or more FcRn variants (e.g., M252Y/S254T/T256E, M428L, N434S, N434A, M428L/N434S, M428L/N434A, etc.), (e) a scFv linker (including those shown in FIG. 5; see, e.g., SEQ ID NOs: 1-11, 20, 21, and 81-92), and one or both of the heavy chains can comprise one or more pI variants (see, e.g., FIGS. 1 and 2). The various types of variants can be used alone, or in combination with other variant types described herein.

[0416] In some embodiments, one or both of the Fc domains are configured such that one or both of the Fc domains have wildtype FcγR effector function. In some embodiments, the heterodimeric Fc backbone pairs have wildtype FcγR effector function, including, but not limited to, those pairs of Fc backbones shown in the Figures.

[0417] In some embodiments, one or both of the Fc domains include one or more amino acid substitutions such that one or both of the Fc domains have increased ADCC activity. In certain embodiments, the amino acid substitutions include one or more of: S239D, I332E, or S239D/I332E, or any of the Fc ADCC variants shown in FIG. 4. In some instances, the Fc backbone pair comprises an asymmetric, ADCC-enhanced heterodimeric Fc backbone pair (as described above). In other embodiments, the Fc backbone pair comprises a symmetric, ADCC-enhanced heterodimeric Fc backbone pair (as described above). In some instances, monomer 1 and monomer 2 (of the heterodimeric Fc backbone pair) can contain identical amino acid substitutions. In other instances, monomer 1 and monomer 2 can contain at least one amino acid substitution that is the same. In still other instances, monomer 1 and monomer 2 can contain amino acid substitutions that are unique to each monomer. In some embodiments, the heterodimeric Fc backbone pairs have increased ADCC activity, including, but not limited to, those pairs of Fc backbones shown in the Figures. In some embodiments, one or both of the Fc domains include one or more amino acid substitutions such that one or both of the Fc domains have increased ADCC activity, and optionally one or more of: (i) one or more skew variants, (ii) one or more ablation variants, (iii) one or more variants that improve serum half-life, (iv) one or more pI variants in the constant domain of the first and/or second monomer, or (v) any combination thereof.

[0418] In some embodiments, one or both of the Fc domains include heterodimerization skew variants (e.g., a set of amino acid substitutions, including, but not limited to, those shown in FIGS. 1A-1F). Particularly useful heterodimerization skew variants include, but are not limited to: (i) S364K/E357Q: L368D/K370S, (ii) L368D/K370S: S364K, (iii) L368E/K370S: S364K, (iv) T411E/K360E/Q362E: D401K, (v) L368D/K370S: S364K/E357L, (vi) K370S: S364K/E357Q, (vii) T366S/L368A/Y407V: T366W, and (viii) T366S/L368A/Y407V/Y349C: T366W/S354C (according to EU numbering). In exemplary embodiments, one of the first or second variant Fc domains includes the heterodimerization skew variants L368D/K370S, and the other of the second or first variant Fc domain includes heterodimerization skew variants S364K/E357Q, wherein numbering is according to EU numbering. In some instances, the heterodimerization skew variants are in an asymmetric configuration, as described above. In other embodiments, the heterodimerization skew variants are in a symmetric configuration, as described above. In some instances, monomer 1 and monomer 2 (of the heterodimeric Fc backbone pair) can contain identical amino acid substitutions. In other instances, monomer 1 and monomer 2 can contain at least one amino acid substitution that is the same. In still other instances, monomer 1 and monomer 2 can contain amino acid substitutions that are unique to each monomer. In some embodiments, one or both of the Fc domains include heterodimerization skew variants, and optionally one or more of: (i) one or more Fc ADCC variants, (ii) one or more ablation variants, (iii) one or more variants that improve serum half-life, (iv) one or more pI variants in the constant domain of the first and/or second monomer, or (v) any combination thereof.

[0419] In some embodiments, one or both of the Fc domains include one or more amino acid substitutions such that one or both of the Fc domains have improved serum half-life. In certain embodiments, the amino acid substitutions include one or more of: M252Y/S254T/T256E, M428L, N434S, N434A, M428L/N434S, or M428L/N434A. In some instances, the Fc backbone pair comprises an asymmetric, Xtend heterodimeric Fc backbone pair (as described above). In other embodiments, the Fc backbone pair comprises a symmetric, Xtend heterodimeric Fc backbone pair (as described above). In some instances, monomer 1 and monomer 2 (of the heterodimeric Fc backbone pair) can contain identical amino acid substitutions. In other instances, monomer 1 and monomer 2 can contain at least one amino acid substitution that is the same. In still other instances, monomer 1 and monomer 2 can contain amino acid substitutions that are unique to each monomer. In some embodiments, the heterodimeric Fc backbone pairs have increased serum half-life, including, but not limited to, those pairs of Fc backbones shown in the Figures. In some embodiments, one or both of the Fc domains include one or more amino acid substitutions such that one or both of the Fc domains have improved serum half-life, and optionally one or more of: (i) one or more skew variants, (ii) one or more ablation variants, (iii) one or more Fc ADCC variants, (iv) one or more pI variants in the constant domain of the first and/or second monomer, or (v) any combination thereof.

[0420] In some embodiments, one or both of the Fc domains include one or more amino acid substitutions such that one or both of the Fc domains have an ablated FcγR function. Nonlimiting examples of amino acid substitutions (and combinations thereof) conferring an ablated FcγR function are shown in, for example, FIG. 3. In some instances, the Fc backbone pair comprises an asymmetric FcKO heterodimeric Fc backbone pair (as described above). In other embodiments, the Fc backbone pair comprises a symmetric, FcKO heterodimeric Fc backbone pair (as described above). In some instances, monomer 1 and monomer 2 (of the heterodimeric Fc backbone pair) can contain identical amino acid substitutions. In other instances, monomer 1 and monomer 2 can contain at least one amino acid substitution that is the same. In still other instances, monomer 1 and monomer 2 can contain amino acid substitutions that are unique to each monomer. In some embodiments, the heterodimeric Fc backbone pairs have ablated FcγR function, including, but not limited to, those pairs of Fc backbones shown in the Figures. In some embodiments, each of the first and second Fc domains include the ablation variants E233P/L234V/L235A/G236_/S267K, wherein numbering is according to EU numbering. In some embodiments, one or both of the Fc domains include one or more amino acid substitutions such that one or both of the Fc domains have an ablated FcγR function, and optionally one or more of: (i) one or more skew variants, (ii) one or more Fc ADCC variants, (iii) one or more variants that improve serum half-life, (iv) one or more pI variants in the constant domain of the first and/or second monomer, or (v) any combination thereof.

[0421] In some embodiments, the constant domain (CH1-hinge-CH2-CH3) of the first and/or second monomer includes pI variants (including, but not limited to, those shown in FIGS. 1 and 2). In exemplary embodiments, the constant domain (CH1-hinge-CH2-CH3) of the first or second monomer includes pI variants N208D/Q295E/N384D/Q418E/N421D, wherein numbering is according to EU numbering. In some embodiments, the constant domain of the first and/or second monomer includes pI variants (including, but not limited to, those shown in FIGS. 1 and 2), and the first and/or second Fc domain optionally contains one or more of: (i) one or more skew variants, (ii) one or more ablation variants, (iii) one or more variants that improve serum half-life, (iv) one or more Fc ADCC variants, or (v) any combination thereof.

[0422] In some embodiments, each of the first antigen binding domains or the second antigen binding domain is a NK cell antigen binding domain. Any suitable NK cell antigen binding domain (as described herein and in the Figures, or a variant thereof) can be included in the subject 2+1 CLC format antibody.

[0423] In some embodiments, each of the first antigen binding domains or the second antigen binding domain is a TTA binding domain. Any suitable TTA binding domain (as described herein and in the Figures, or a variant thereof) can be included in the subject 2+1 CLC format antibody.

[0424] 6. mAb-Fv Format

[0425] One heterodimeric scaffold that finds particular use in the antibodies described herein is the “mAb-Fv” format, as is shown in FIG. 8K. In this embodiment, the format relies on the use of a C-terminal attachment of an “extra” variable heavy domain to one monomer and the C-terminal attachment of an “extra” variable light domain to the other monomer, thus forming a third ABD (i.e., an “extra” Fv domain), wherein the Fab portions of the two monomers bind a TTA and the “extra” scFv domain binds a NK cell antigen.

[0426] In this embodiment, the first monomer comprises: a first heavy chain, comprising a first variable heavy domain and a first constant heavy domain comprising a first Fc domain, with a first variable light domain covalently attached to the C-terminus of the first Fc domain using a domain linker (VH1-CH1-hinge-CH2-CH3-[optional linker]-VL2). The second monomer comprises: a second variable heavy domain, a second constant heavy domain comprising a second Fc domain, and a third variable heavy domain covalently attached to the C-terminus of the second Fc domain using a domain linker (VH1-CH1-hinge-CH2-CH3-[optional linker]-VH2). This embodiment further utilizes a common light chain comprising a variable light domain and a constant light domain, which associates with the heavy chains to form two identical Fabs that include two identical Fvs. The two C-terminally attached variable domains (VL2 and VH2) make up the “extra” third Fv. As for many of the embodiments herein, these constructs can include one or more of: (i) Fc ADCC variants, (ii) pI variants, (iii) ablation variants, (iv) skew variants, (v) variants that improve serum half-life, as well as any combination thereof, as desired and described herein.

[0427] Any suitable NK cell antigen binding domain (as described herein and in the Figures, or a variant thereof) can be included in the subject mAb-Fv format antibody.

[0428] Any suitable TTA binding domain (as described herein and in the Figures, or a variant thereof) can be included in the subject mAb-Fv format antibody.

[0429] 7. Dual scFv Format

[0430] The antibodies described herein also provide dual scFv formats as are known in the art (see, e.g., FIG. 8F). In this embodiment, the anti-NK cell antigen x anti-TTA heterodimeric bispecific antibody is made up of two scFv-Fc monomers (both in either the V_{H}-scFv linker-V_{L}-[optional domain linker]-CH2-CH3 format, the V_{L}-scFv linker-V_{H}-[optional domain linker]-CH2-CH3 format, or with one monomer in one orientation and the other monomer in the other orientation).

[0431] In this case, all ABDs are in the scFv format. Any suitable NK cell ABD and TTA ABD can be included in the subject bispecific antibodies in the dual scFv format, including any of the NK cell ABDs and TTA ABDs described herein and in the Figures, as well as variants thereof.

[0432] In some embodiments, the first and/or second Fc domains of the dual scFv format are variant Fc domains. Generally, variant Fc domains can comprise one or more of: (a) one or more Fc ADCC variants (see, e.g., FIG. 4), (b) one or more skew variants (see, e.g., FIGS. 1A-1F), (c) one or more ablation variants (see, e.g., FIG. 3), (d) one or more FcRn variants (e.g., M428L, N434S, N434A, M428L/N434S, M428L/N434A, M252Y/S254T/T256E, etc.), (e) a scFv linker (including those shown in FIG. 5; see, e.g., SEQ ID NOs: 1-11, 20, 21, and 81-92), and one or both of the heavy chains can comprise one or more pI variants (see, e.g., FIGS. 1 and 2). The various types of variants can be used alone, or in combination with other variant types described herein.

[0433] In some embodiments, one or both of the Fc domains are configured such that one or both of the Fc domains have wildtype FcγR effector function. In some embodiments, the heterodimeric Fc backbone pairs have wildtype FcγR effector function, including, but not limited to, those pairs of Fc backbones shown in the Figures.

[0434] In some embodiments, one or both of the Fc domains include one or more amino acid substitutions such that one or both of the Fc domains have increased ADCC activity. In certain embodiments, the amino acid substitutions include one or more of: S239D, I332E, or S239D/I332E, or any of the Fc ADCC variants shown in FIG. 4. In some instances, the Fc backbone pair comprises an asymmetric, ADCC-enhanced heterodimeric Fc backbone pair (as described above). In other embodiments, the Fc backbone pair comprises a symmetric, ADCC-enhanced heterodimeric Fc backbone pair (as described above). In some instances, monomer 1 and monomer 2 (of the heterodimeric Fc backbone pair) can contain identical amino acid substitutions. In other instances, monomer 1 and monomer 2 can contain at least one amino acid substitution that is the same. In still other instances, monomer 1 and monomer 2 can contain amino acid substitutions that are unique to each monomer. In some embodiments, the heterodimeric Fc backbone pairs have increased ADCC activity, including, but not limited to, those pairs of Fc backbones shown in the Figures. In some embodiments, one or both of the Fc domains include one or more amino acid substitutions such that one or both of the Fc domains have increased ADCC activity, and optionally one or more of: (i) one or more skew variants, (ii) one or more ablation variants, (iii) one or more variants that improve serum half-life, (iv) one or more pI variants in the constant domain of the first and/or second monomer, or (v) any combination thereof.

[0435] In some embodiments, one or both of the Fc domains include heterodimerization skew variants (e.g., a set of amino acid substitutions, including, but not limited to, those shown in FIGS. 1A-1F). Particularly useful heterodimerization skew variants include, but are not limited to: (i) S364K/E357Q: L368D/K370S, (ii) L368D/K370S: S364K, (iii) L368E/K370S: S364K, (iv) T411E/K360E/Q362E: D401K, (v) L368D/K370S: S364K/E357L, (vi) K370S: S364K/E357Q, (vii) T366S/L368A/Y407V: T366W, and (viii) T366S/L368A/Y407V/Y349C: T366W/S354C (according to EU numbering). In exemplary embodiments, one of the first or second variant Fe domains includes the heterodimerization skew variants L368D/K370S, and the other of the second or first variant Fc domain includes heterodimerization skew variants S364K/E357Q, wherein numbering is according to EU numbering. In some instances, the heterodimerization skew variants are in an asymmetric configuration, as described above. In other embodiments, the heterodimerization skew variants are in a symmetric configuration, as described above. In some instances, monomer 1 and monomer 2 (of the heterodimeric Fc backbone pair) can contain identical amino acid substitutions. In other instances, monomer 1 and monomer 2 can contain at least one amino acid substitution that is the same. In still other instances, monomer 1 and monomer 2 can contain amino acid substitutions that are unique to each monomer. In some embodiments, one or both of the Fc domains include heterodimerization skew variants, and optionally one or more of: (i) one or more Fc ADCC variants, (ii) one or more ablation variants, (iii) one or more variants that improve serum half-life, (iv) one or more pI variants in the constant domain of the first and/or second monomer, or (v) any combination thereof.

[0436] In some embodiments, one or both of the Fc domains include one or more amino acid substitutions such that one or both of the Fc domains have improved serum half-life. In certain embodiments, the amino acid substitutions include one or more of: M252Y/S254T/T256E, M428L, N434S, N434A, M428L/N434S, or M428L/N434A. In some instances, the Fc backbone pair comprises an asymmetric, Xtend heterodimeric Fc backbone pair (as described above). In other embodiments, the Fc backbone pair comprises a symmetric, Xtend heterodimeric Fc backbone pair (as described above). In some instances, monomer 1 and monomer 2 (of the heterodimeric Fc backbone pair) can contain identical amino acid substitutions. In other instances, monomer 1 and monomer 2 can contain at least one amino acid substitution that is the same. In still other instances, monomer 1 and monomer 2 can contain amino acid substitutions that are unique to each monomer. In some embodiments, the heterodimeric Fc backbone pairs have increased serum half-life, including, but not limited to, those pairs of Fc backbones shown in the Figures. In some embodiments, one or both of the Fc domains include one or more amino acid substitutions such that one or both of the Fc domains have improved serum half-life, and optionally one or more of: (i) one or more skew variants, (ii) one or more ablation variants, (iii) one or more Fc ADCC variants, (iv) one or more pI variants in the constant domain of the first and/or second monomer, or (v) any combination thereof.

[0437] In some embodiments, one or both of the Fc domains include one or more amino acid substitutions such that one or both of the Fc domains have an ablated FcγR function. Nonlimiting examples of amino acid substitutions (and combinations thereof) conferring an ablated FcγR function are shown in, for example, FIG. 3. In some instances, the Fc backbone pair comprises an asymmetric FcKO heterodimeric Fc backbone pair (as described above). In other embodiments, the Fc backbone pair comprises a symmetric, FcKO heterodimeric Fc backbone pair (as described above). In some instances, monomer 1 and monomer 2 (of the heterodimeric Fc backbone pair) can contain identical amino acid substitutions. In other instances, monomer 1 and monomer 2 can contain at least one amino acid substitution that is the same. In still other instances, monomer 1 and monomer 2 can contain amino acid substitutions that are unique to each monomer. In some embodiments, the heterodimeric Fc backbone pairs have ablated FcγR function, including, but not limited to, those pairs of Fc backbones shown in the Figures. In some embodiments, each of the first and second Fc domains include the ablation variants E233P/L234V/L235A/G236_/S267K, wherein numbering is according to EU numbering. In some embodiments, one or both of the Fc domains include one or more amino acid substitutions such that one or both of the Fc domains have an ablated FcγR function, and optionally one or more of: (i) one or more skew variants, (ii) one or more Fc ADCC variants, (iii) one or more variants that improve serum half-life, (iv) one or more pI variants in the constant domain of the first and/or second monomer, or (v) any combination thereof.

[0438] In some embodiments, the constant domain (CH1-hinge-CH2-CH3) of the first and/or second monomer includes pI variants (including, but not limited to, those shown in FIGS. 1 and 2). In exemplary embodiments, the constant domain (CH1-hinge-CH2-CH3) of the first or second monomer includes pI variants N208D/Q295E/N384D/Q418E/N421D, wherein numbering is according to EU numbering. In some embodiments, the constant domain of the first and/or second monomer includes pI variants (including, but not limited to, those shown in FIGS. 1 and 2), and the first and/or second Fc domain optionally contains one or more of: (i) one or more skew variants, (ii) one or more ablation variants, (iii) one or more variants that improve serum half-life, (iv) one or more Fc ADCC variants, or (v) any combination thereof.

[0439] In some embodiments, the first scFv or the second scFv is the domain that binds to the NK cell antigen. Any suitable NK cell antigen V_{H}/V_{L} pairs described herein (and in the Figures), or a variant thereof, can be included in the subject dual scFv format antibody.

[0440] In some embodiments, the first scFv or the second scFv is the domain that binds to the TTA. Any suitable TTA V_{H}/V_{L} pairs described herein (and in the Figures), or a variant thereof, can be included in the subject dual scFv format antibody.

[0441] 8. One-Armed scFv-mAb Format

[0442] One heterodimeric scaffold that finds particular use in the antibodies described herein is the “one-armed scFv-mAb” format, as is shown in FIG. 8G. This format includes: 1) a first monomer that comprises an “empty” Fc domain; 2) a second monomer that includes a first variable heavy domain (V_{H}), a scFv domain (a second ABD), an Fc domain, where the scFv domain is attached to the N-terminus of the first variably heavy domain; and 3) a light chain that includes a first variable light domain and a constant light domain. The first variable heavy domain and the first variable light domain form a first antigen binding domain and the scFv is a second antigen binding domain. In this format, one of the first ABDs and the second ABDs binds a NK cell antigen, and the other ABD binds a TTA. As for many of the embodiments herein, these constructs can include one or more of: (i) Fc ADCC variants, (ii) pI variants, (iii) ablation variants, (iv) skew variants, (v) variants that improve serum half-life, as well as any combination thereof, as desired and described herein.

[0443] Any suitable NK cell antigen binding domain (as described herein and in the Figures, or a variant thereof) can be included in the subject one-armed scFv-mAb format antibody.

[0444] Any suitable TTA binding domain (as described herein and in the Figures, or a variant thereof) can be included in the subject one-armed scFv-mAb format antibody.

[0445] 9. One-Armed Central-scFv Format

[0446] One heterodimeric scaffold that finds particular use in the antibodies described herein is the “one-armed central-scFv” format (also referred to herein as the “1+1 Empty×Fab-scFv” format), as is shown in FIG. 8J. In this embodiment, one monomer comprises just an Fc domain (i.e., a first Fc domain), while the other monomer includes a Fab domain (a first ABD), a scFv (a second ABD), and an Fc domain (i.e., a second Fc domain), where the scFv domain is inserted between the first Fc domain and the second Fc domain. In this format, the Fab portion binds one receptor target and the scFv binds another. In this format, either the Fab portion binds a TTA and the scFv binds a NK cell antigen, or vice versa.

[0447] In this embodiment, one monomer comprises a first heavy chain comprising a first variable heavy domain, a CH1 domain, and a Fc domain, with a scFv comprising a scFv variable light domain, an scFv linker, and a scFv variable heavy domain. The scFv is covalently attached between the C-terminus of the CH1 domain of the heavy constant domain and the N-terminus of the first Fc domain using domain linkers, in either orientation, VH1-CH1-[optional domain linker]-VH2-scFv linker-VL2-[optional domain linker]-CH2-CH3 or VH1-CH1-[optional domain linker]-VL2-scFv linker-VH2-[optional domain linker]-CH2-CH3. The second monomer comprises an Fc domain (CH2-CH3). This embodiment further utilizes a light chain comprising a variable light domain and a constant light domain that associates with the heavy chain to form a Fab. As for many of the embodiments herein, these constructs can include one or more of: (i) Fc ADCC variants, (ii) pI variants, (iii) ablation variants, (iv) skew variants, (v) variants that improve serum half-life, as well as any combination thereof, as desired and described herein.

[0448] Any suitable NK cell antigen binding domain (as described herein and in the Figures, or a variant thereof) can be included in the subject one-armed central-scFv format antibody.

[0449] Any suitable TTA binding domain (as described herein and in the Figures, or a variant thereof) can be included in the subject one-armed central-scFv format antibody.

[0450] 10. Central-Fv Format

[0451] One heterodimeric scaffold that finds particular use in the antibodies described herein is the “central-Fv” format, as is shown in FIG. 8L. In this embodiment, the format relies on the use of an inserted Fv domain (i.e., the central Fv domain) thus forming an “extra” third ABD, wherein the Fab portions of the two monomers bind a TTA and the “extra” central Fv domain binds a NK cell antigen. The Fv domain is inserted between the Fc domain and the CH1-Fv region of the monomers, thus providing a third ABD, wherein each monomer contains a component of the Fv (e.g., one monomer comprises a variable heavy domain and the other comprises a variable light domain of the “extra” central Fv domain).

[0452] In this embodiment, one monomer comprises a first heavy chain comprising a first variable heavy domain, a CH1 domain, and Fc domain, and an additional variable light domain. The additional variable light domain is covalently attached between the C-terminus of the CH1 domain of the heavy constant domain and the N-terminus of the first Fc domain using domain linkers (VH1-CH1-[optional linker]-VL2-hinge-CH2-CH3). The other monomer comprises a first heavy chain comprising a first variable heavy domain, a CH1 domain and Fc domain, and an additional variable heavy domain (VH1-CH1-[optional linker]-VH2-hinge-CH2-CH3). The additional variable heavy domain is covalently attached between the C-terminus of the CH1 domain of the heavy constant domain and the N-terminus of the first Fc domain using domain linkers. This embodiment further utilizes a common light chain comprising a variable light domain and a constant light domain, that associates with the heavy chains to form two identical Fabs that each bind a TTA. The additional variable heavy domain and additional variable light domain form an “extra” central Fc that binds a NK cell antigen. As for many of the embodiments herein, these constructs can include one or more of: (i) Fc ADCC variants, (ii) pI variants, (iii) ablation variants, (iv) skew variants, (v) variants that improve serum half-life, as well as any combination thereof, as desired and described herein.

[0453] Any suitable NK cell antigen binding domain (as described herein and in the Figures, or a variant thereof) can be included in the subject central-Fv format antibody.

[0454] Any suitable TTA binding domain (as described herein and in the Figures, or a variant thereof) can be included in the subject central-Fv format antibody.

[0455] 11. scFv-mAb Format

[0456] One heterodimeric scaffold that finds particular use in the antibodies described herein is the “scFv-mAb” format, as is shown in FIG. 8H. In this embodiment, the format relies on the use of a N-terminal attachment of a scFv to one of the monomers, thus forming a third ABD, wherein the Fab portions of the two monomers bind a TTA and the “extra” scFv domain binds a NK cell antigen.

[0457] In this embodiment, the first monomer comprises a first heavy chain (comprising a variable heavy domain and a constant domain), with a N-terminally covalently attached scFv comprising a scFv variable light domain, an scFv linker, and a scFv variable heavy domain in either orientation ((VH1-scFv linker-VL1-[optional domain linker]-VH2-CH1-hinge-CH2-CH3) or (with the scFv in the opposite orientation (VL1-scFv linker-VH1-[optional domain linker]-VH2-CH1-hinge-CH2-CH3))). This embodiment further utilizes a common light chain comprising a variable light domain and a constant light domain that associates with the heavy chains to form two identical Fabs that bind a TTA. As for many of the embodiments herein, these constructs can include one or more of: (i) Fc ADCC variants, (ii) pI variants, (iii) ablation variants, (iv) skew variants, (v) variants that improve serum half-life, as well as any combination thereof, as desired and described herein.

[0458] Any suitable NK cell antigen binding domain (as described herein and in the Figures, or a variant thereof) can be included in the subject scFv-mAb format antibody.

[0459] Any suitable TTA binding domain (as described herein and in the Figures, or a variant thereof) can be included in the subject scFv-mAb format antibody.

[0460] 12. 2+1 Stack Fab₂-scFv-Fc Format

[0461] One heterodimeric scaffold that finds particular use in the antibodies described herein is the “2+1 stack Fab₂-scFv-Fc” (or “stack Fab₂-scFv-Fc” or “2+1 Fab2×scFv”) format, as is shown in FIG. 8N. In this embodiment, the format relies on the use of a “stacked” Fab portion that binds a first target antigen (e.g., a TTA), and an scFv domain that binds a second target antigen (e.g., a NK cell antigen). In this format, the first monomer comprises, from N-terminus to C-terminus, a first heavy chain (comprising a variable heavy domain and a constant domain), a domain linker, and a second heavy chain (comprising a variable heavy domain and a constant domain), and a first Fc domain; the second monomer comprises, from N-terminus to C-terminus, a scFv comprising a scFv variable light domain, an scFv linker, and a scFv variable heavy domain in either orientation ((VH1-CH1-hinge-CH2-CH3-[optional linker]-VH2-scFv linker-VL2) or (VH1-CH1-hinge-CH2-CH3-[optional linker]-VL2-scFv linker-VH2)), and a second Fc domain; and the third monomer comprises a common light chain including a variable light domain and a constant light domain, that associates with the heavy chains to form two identical Fabs that bind a TTA. As for many of the embodiments herein, these constructs can include one or more of: (i) Fc ADCC variants, (ii) pI variants, (iii) ablation variants, (iv) skew variants, (v) variants that improve serum half-life, as well as any combination thereof, as desired and described herein.

[0462] Any suitable NK cell antigen binding domain (as described herein and in the Figures, or a variant thereof) can be included in the subject 2+1 stack Fab₂-scFv-Fc format antibody.

[0463] Any suitable TTA binding domain (as described herein and in the Figures, or a variant thereof) can be included in the subject 2+1 stack Fab₂-scFv-Fc format antibody.

[0464] 13. Non-Heterodimeric Bispecific Antibodies

[0465] As will be appreciated by those in the art, the anti-NK cell antigen x anti-TTA antibodies provided herein can also be included in non-heterodimeric bispecific formats (see, e.g., FIG. 8I).

[0466] In this format, the anti-NK cell antigen x anti-TTA antibody includes: (i) a first monomer comprising a VH1-CH1-hinge-CH2-CH3, (ii) a second monomer comprising a VH2-CH1-hinge-CH2-CH3, (iii) a first light chain comprising a VL1-C_{L}, and (iv) a second light chain comprising a VL2-C_{L}. In such embodiments, the VH1 and VL1 form a first ABD, and VH2 and VL2 form a second ABD. One of the first or second ABDS binds a TTA, and the other ABD binds a NK cell antigen.

[0467] Any suitable NK cell antigen binding domain (as described herein and in the Figures, or a variant thereof) can be included in the subject non-heterodimeric bispecific format antibody.

[0468] Any suitable TTA binding domain (as described herein and in the Figures, or a variant thereof) can be included in the subject non-heterodimeric bispecific format antibody. In some embodiments, the TTA binding domain binds to the extracellular domain of any human TTA selected from the group including EGFR, HER2, Trop2, B7H3, FLT3, DLL3, CD19, CD20, CD123, CEA, MSLN, BCMA, CAIX, CLDN18.2, PD-1 and ANOL.

[0469] 14. Trident Format

[0470] In some embodiments, the bispecific antibodies described herein are in the “Trident” format as generally described in WO2015/184203, hereby expressly incorporated by reference in its entirety and in particular for the Figures, Legends, definitions, and sequences of “Heterodimer-Promoting Domains” or “HPDs”, including “K-coil” and “E-coil” sequences. Tridents rely on using two different HPDs that associate to form a heterodimeric structure as a component of the structure. In this embodiment, the Trident format includes a “traditional” heavy and light chain (e.g., VH1-CH1-hinge-CH2-CH3 and VL1-CL), a third chain comprising a first “diabody-type binding domain” or “DART®,” VH2-(linker)-VL3-HPD1, and a fourth chain comprising a second DART®, VH3-(linker)-(linker)-VL2-HPD2. The VH1 and VL1 form a first ABD, the VH2 and VL2 form a second ABD, and the VH3 and VL3 form a third ABD. In some cases, the second and third ABDs bind the same antigen, in this instance generally a TTA, e.g., bivalently, with the first ABD binding a NK cell antigen monovalently.

[0471] Any suitable NK cell antigen binding domain (as described herein and in the Figures, or a variant thereof) can be included in the subject Trident format antibody.

[0472] Any suitable TTA binding domain (as described herein and in the Figures, or a variant thereof) can be included in the subject Trident format antibody. In some embodiments, the TTA binding domain binds to the extracellular domain of any human TTA selected from the group including EGFR, HER2, Trop2, B7H3, FLT3, DLL3, CD19, CD20, CD123, CEA, MSLN, BCMA, CAIX, CLDN18.2, PD-1 and ANO1.

[0473] D. Particular Embodiments of the Invention with Increased Binding to FcγRIIIa

[0474] As discussed herein, the disclosure provides NKE antibodies, including multispecific antibodies, that bind to NK antigens, CD16A, and a tumor target antigen (TTA), and have increased binding to CD16A as compared to human IgG1. As discussed herein, the ABDs that bind to either the NK antigen or the TTA can be monovalent or bivalent binding.

[0475] Preferred combinations of NK ABDs and TTAs include, but are not limited to, NKG2D and CD19, NKG2D and CAIX, NKG2D and 5T4, NKG2D and CD20, NKG2D and FLT3, NKG2D and EGFR, NKG2D and CXCR4, NKG2D and EpCAM, NKG2D and CLEC12A, NKG2D and CD33, NKG2D and HER2, NKG2D and BCMA, NKG2D and FAP, NKG2D and CD22, NKG2D and CD38, NKG2D and DLL3, NKG2D and P-Cadherin, NKG2D and cMET, and NKG2D and B7H3, wherein the ABDs for each are selected from the sequences depicted herein.

[0476] Preferred combinations of NK ABDs and TTAs include, but are not limited to, NKp46 and CD19, NKp46 and CAIX, NKp46 and 5T4, NKp46 and CD20, NKp46 and FLT3, NKp46 and EGFR, NKp46 and CXCR4, NKp46 and EpCAM, NKp46 and CLEC12A, NKp46 and CD33, NKp46 and HER2, NKp46 and BCMA, NKp46 and FAP, NKp46 and CD22, NKp46 and CD38, NKp46 and DLL3, NKp46 and P-Cadherin, NKp46 and cMET, and NKp46 and B7H3, wherein the ABDs for each are selected from the sequences depicted herein.

[0477] Preferred combinations of NK ABDs and TTAs include, but are not limited to, NKp30 and CD19, NKp30 and CAIX, NKp30 and 5T4, NKp30 and CD20, NKp30 and FLT3, NKp30 and EGFR, NKp30 and CXCR4, NKp30 and EpCAM, NKp30 and CLEC12A, NKp30 and CD33, NKp30 and HER2, NKp30 and BCMA, NKp30 and FAP, NKp30 and CD22, NKp30 and CD38, NKp30 and DLL3, NKp30 and P-Cadherin, NKp30 and cMET, and NKp30 and B7H3, wherein the ABDs for each are selected from the sequences depicted herein.

[0478] In some embodiments, the NKE multispecific antibodies are as generally described in WO2019/101695, hereby incorporated by reference in its entirety, with the addition of Fc variants that increase the binding of the Fc domain to CD16A.

[0479] Embodiment (A): In some embodiments, the NKE antibody comprises: a) means for binding the extracellular domain of human NKG2D; and b) a variant IgG1 Fc dimeric domain comprising an amino acid substitution as compared to human IgG1, wherein the variant has increased in vitro binding to the human FcγRIIIa receptor as compared to human IgG1. Suitable variable heavy VH and variable light VL domains that bind to the ECD of human NKG2D include, but are not limited to, VH/VL pairs selected from the group including: (i) SEQ ID NOs: 911 and 915, (ii) SEQ ID NOs: 919 and 923, (iii) SEQ ID NOs: 927 and 931, (iv) SEQ ID NOs: 935 and 939, (v) SEQ ID NOs: 943 and 944, (vi) SEQ ID NOs: 945 and 946, (vii) SEQ ID NOs: 947 and 948, (viii) SEQ ID NOs: 949 and 950, (ix) SEQ ID NOs: 951 and 952, (x) SEQ ID NOs: 953 and 954, (xi) SEQ ID NOs: 955 and 956, (xii) SEQ ID NOs: 957 and 958, (xiii) SEQ ID NOs: 959 and 960, (xiv) SEQ ID NOs: 961 and 962, (xv) SEQ ID NOs: 963 and 964, (xvi) SEQ ID NOs: 965 and 966, (xvii) SEQ ID NOs: 967 and 968, (xviii) SEQ ID NOs: 969 and 970, (xix) SEQ ID NOs: 971 and 972, (xx) SEQ ID NOs: 973 and 2004, (xxi) SEQ ID NOs: 974 and 975, (xxii) SEQ ID NOs: 976 and 977, (xxiii) SEQ ID NOs: 978 and 979, (xxiv) SEQ ID NOs: 980 and 981, (xxv) SEQ ID NOs: 982 and 983, (xxvi) SEQ ID NOs: 984 and 985, (xxvii) SEQ ID NOs: 986 and 987, (xxviii) SEQ ID NOs: 988 and 989, (xxix) SEQ ID NOs: 990 and 991, (xxx) SEQ ID NOs: 992 and 993, (xxxi) SEQ ID NOs: 994 and 995, (xxxii) SEQ ID NOs: 996 and 997, (xxxiii) SEQ ID NOs: 998 and 999, (xxxiv) SEQ ID NOs: 1000 and 1001, (xxxv) SEQ ID NOs: 1002 and 1003, (xxxvi) SEQ ID NOs: 1004 and 1005, (xxxvii) SEQ ID NOs: 1006 and 1007, (xxxviii) SEQ ID NOs: 1008 and 1009, (xxxix) SEQ ID NOs: 1010 and 1011, (xl) SEQ ID NOs: 1012 and 1013, (xli) SEQ ID NOs: 1014 and 1015, (xlii) SEQ ID NOs: 1016 and 1017, (xliii) SEQ ID NOs: 1018 and 1019, (xliv) SEQ ID NOs: 1020 and 1021, (xlv) SEQ ID NOs: 1024 and 1025, (xlvi) SEQ ID NOs: 1026 and 1027, (xlvii) SEQ ID NOs: 1028 and 1029, (xlviii) SEQ ID NOs: 1030 and 1031, (xlix) SEQ ID NOs: 1032 and 1033, (1) SEQ ID NOs: 1034 and 1035, (li) SEQ ID NOs: 1036 and 1037, (lii) SEQ ID NOs: 1038 and 1039, (liii) SEQ ID NOs: 1040 and 1041, (liv) SEQ ID NOs: 1042 and 1043, (lv) SEQ ID NOs: 1042 and 1045, (lvi) SEQ ID NOs: 1044 and 1043, (lvii) SEQ ID NOs: 1044 and 1045, (lviii) SEQ ID NOs: 1046 and 1049, (lix) SEQ ID NOs: 1046 and 1050, (lx) SEQ ID NOs: 1046 and 1051, (lxi) SEQ ID NOs: 1047 and 1049, (lxii) SEQ ID NOs: 1047 and 1050, (lxiii) SEQ ID NOs: 1047 and 1051, (lxiv) SEQ ID NOs: 1048 and 1049, (lxv) SEQ ID NOs: 1048 and 1050, (lxvi) SEQ ID NOs: 1048 and 1051, (lxvii) SEQ ID NOs: 1052 and 1054, (lxviii) SEQ ID NOs: 1052 and 1055, (lxix) SEQ ID NOs: 1053 and 1054, (lxx) SEQ ID NOs: 1053 and 1055, (lxxi) SEQ ID NOs: 1056 and 1057, (lxxii) SEQ ID NOs: 1058 and 1059, (lxxiii) SEQ ID NOs: 1060 and 1061, (lxxiv) SEQ ID NOs: 1062 and 1063, (lxxv) SEQ ID NOs: 1064 and 1065, (lxxvi) SEQ ID NOs: 1066 and 1067, (lxxvii) SEQ ID NOs: 1068 and 1069, (lxxviii) SEQ ID NOs: 1070 and 915, (lxxix) SEQ ID NOs: 1074 and 915, (lxxx) SEQ ID NOs: 1078 and 915, (lxxxi) SEQ ID NOs: 1082 and 915, (lxxxii) SEQ ID NOs: 1086 and 915, (lxxxiii) SEQ ID NOs: 1090 and 915, (lxxxix) SEQ ID NOs: 1094 and 915, (lxxxv) SEQ ID NOs: 1098 and 915, (lxxxvi) SEQ ID NOs: 1102 and 915, (lxxxvii) SEQ ID NOs: 1106 and 915, (lxxxviii) SEQ ID NOs: 1110 and 915, (lxxxix) SEQ ID NOs: 1114 and 915, (xc) SEQ ID NOs: 1118 and 915, (xci) SEQ ID NOs: 1122 and 915, (xcii) SEQ ID NOs: 1126 and 915, (xciii) SEQ ID NOs: 1130 and 915, (xciv) SEQ ID NOs: 1134 and 915, (xcv) SEQ ID NOs: 1138 and 915, (xcvi) SEQ ID NOs: 1142 and 915, (xcvii) SEQ ID NOs: 1146 and 915, (xcviii) SEQ ID NOs: 1150 and 915, (xcix) SEQ ID NOs: 1154 and 915, (c) SEQ ID NOs: 1158 and 915, (ci) SEQ ID NOs: 1162 and 915, (cii) SEQ ID NOs: 1166 and 915, (ciii) SEQ ID NOs: 1170 and 915, (civ) SEQ ID NOs: 1174 and 915, (cv) SEQ ID NOs: 1178 and 915, (cvi) SEQ ID NOs: 1182 and 915, (cvii) SEQ ID NOs: 1186 and 915, (cviii) SEQ ID NOs: 1189 and 915, (cix) SEQ ID NOs: 1192 and 915, (cx) SEQ ID NOs: 1196 and 915, (cxi) SEQ ID NOs: 1200 and 915, (cxii) SEQ ID NOs: 1204 and 915, (cxiii) SEQ ID NOs: 1208 and 915, (cxiv) SEQ ID NOs: 1212 and 915, (cxv) SEQ ID NOs: 1216 and 915, (cxvi) SEQ ID NOs: 1220 and 915, (cxvii) SEQ ID NOs: 1224 and 915, (cxviii) SEQ ID NOs: 1228 and 915, (cxix) SEQ ID NOs: 1232 and 915, (cxx) SEQ ID NOs: 1236 and 915, (cxxi) SEQ ID NOs: 1240 and 915, (cxxii) SEQ ID NOs: 1244 and 915, (cxxiii) SEQ ID NOs: 1248 and 915, (cxxiv) SEQ ID NOs: 1252 and 915, and (cxxv) SEQ ID NOs: 1256 and 915, as shown in FIGS. 26A-26Z. In some further embodiments, the NKE antibody (such as the NKG2D NKE antibody described herein) further comprises means for binding the ECD of a human TTA selected from a group including: (1) B7H3, (2) EGFR, (3) HER2, (4) CD19, (5) CD20, (6) CD123, (7) CAIX, (8) FLT3, (9) MSLN, (10) Trop2, (11) CEA, (12) CLDN18.2, (13) BCMA, (14) DLL3, (15) PD-1, (16) ANO1, (17) CD22, and (18) CD38, as described in further detail below. In still some further embodiments, the variant IgG1 Fc domain comprises an amino acid substitution selected from a group including: S239D, S239E, S239D/I332E, I332E, and I332D. In still some other further embodiments, the variant IgG1 Fc domain comprises an amino acid substitution selected from a group including: S239D, S239E, I332D, I332E, S239D/I332E, S239E/I332E, S239D/I332D, S239E/I332D, S239D/A330L/I332E, S239D/A330L, A330L/I332E, F243L, F243L/R292P/Y300L/V305I/P396L, 332I/P247I/A339Q, S298A/E333A/K334A, V264I/I332E, S298A, S298A/I332E, S298A/E333A/K334A, S239Q/I332E, D265G, Y296Q, S298T, L328I/I332E, V264T, V266I, S239D/I332N, S239E/I332N, S239E/I332Q, S239N/I332E, S239Q/I332D, K326E, A330Y/I332E, V264I/A330Y/I332E, A330L/I332E, V264I/A330L/I332E, L234D, L234E, L234I, L235D, L235T, A330F, L328V/I332E, S239Q/V264I/I332E, S239E/V264I/A330Y/I332E, K274R, N276Y, S324T, K334I, K334F, L234I/L235D, L235D/S239D/A330Y/I332E, S239D/V240I/A330Y/I332E, S239D/V264T/A330Y/I332E, S239D/K326E/A330Y/I332E, S239D/K326T/A330Y/I332E, E293R, S324G, E272R, P227G, G236S, D221K, H224E, K246H, D249Y, R255Y, E258H, T260H, G281D, E283H, E283L, V284E, S239D/E272I/I332E, S239D/E272Y/A330L/I332E, S239D/E272I/A330L/I332E, S239D/K274E/I332E, S239D/K326T/I332E, S239D/K326E/I332E and S239D/K274E/A330L/I332E.

[0480] Embodiment (A)(1): In some further embodiments of an NKG2D NKE antibody comprising means for binding the ECD of a human TTA, the human TTA comprises human B7H3. Suitable variable heavy VH and variable light VL domains that bind to the ECD of human B7H3 include, but are not limited to, VH/VL pairs selected from the group including: (i) SEQ ID NOs: 1260 and 1264, (ii) SEQ ID NOs: 1268 and 1272, (iii) SEQ ID NOs: 1276 and 1280, (iv) SEQ ID NOs: 1284 and 1288, (v) SEQ ID NOs: 1292 and 1296, (vi) SEQ ID NOs: 1300 and 1296, (vii) SEQ ID NOs: 1301 and 1296, (viii) SEQ ID NOs: 1302 and 1296, (ix) SEQ ID NOs: 1303 and 1296, (x) SEQ ID NOs: 1304 and 1296, (xi) SEQ ID NOs: 1305 and 1296, (xii) SEQ ID NOs: 1306 and 1296, (xiii) SEQ ID NOs: 1307 and 1296, (xiv) SEQ ID NOs: 1308 and 1296, (xv) SEQ ID NOs: 1309 and 1296, (xvi) SEQ ID NOs: 1310 and 1296, (xvii) SEQ ID NOs: 1311 and 1296, (xviii) SEQ ID NOs: 1312 and 1296, (xix) SEQ ID NOs: 1313 and 1296, (xx) SEQ ID NOs: 1314 and 1296, (xxi) SEQ ID NOs: 1315 and 1296, (xxii) SEQ ID NOs: 1316 and 1296, (xxiii) SEQ ID NOs: 1317 and 1296, (xxiv) SEQ ID NOs: 1318 and 1296, (xxv) SEQ ID NOs: 1319 and 1296, (xxvi) SEQ ID NOs: 1320 and 1296, (xxvii) SEQ ID NOs: 1321 and 1296, (xxviii) SEQ ID NOs: 1322 and 1296, (xxix) SEQ ID NOs: 1323 and 1296, (xxx) SEQ ID NOs: 1324 and 1296, (xxxi) SEQ ID NOs: 1325 and 1296, (xxxii) SEQ ID NOs: 1326 and 1296, (xxxiii) SEQ ID NOs: 1327 and 1296, (xxxiv) SEQ ID NOs: 1328 and 1296, (xxxv) SEQ ID NOs: 1329 and 1296, (xxxvi) SEQ ID NOs: 1330 and 1296, (xxxvii) SEQ ID NOs: 1331 and 1296, (xxxviii) SEQ ID NOs: 1332 and 1296, (xxxix) SEQ ID NOs: 1333 and 1296, (xl) SEQ ID NOs: 1334 and 1296, (xli) SEQ ID NOs: 1335 and 1296, (xlii) SEQ ID NOs: 1336 and 1296, (xliii) SEQ ID NOs: 1337 and 1296, (xliv) SEQ ID NOs: 1338 and 1296, (xlv) SEQ ID NOs: 1339 and 1296, (xlvi) SEQ ID NOs: 1340 and 1296, (xlvii) SEQ ID NOs: 1341 and 1296, (xlviii) SEQ ID NOs: 1342 and 1296, (xlix) SEQ ID NOs: 1343 and 1296, (1) SEQ ID NOs: 1344 and 1296, (li) SEQ ID NOs: 1345 and 1296, (lii) SEQ ID NOs: 1346 and 1296, (liii) SEQ ID NOs: 1347 and 1296, (liv) SEQ ID NOs: 1348 and 1296, (lv) SEQ ID NOs: 1349 and 1296, (lvi) SEQ ID NOs: 1350 and 1296, (lvii) SEQ ID NOs: 1351 and 1296, (lviii) SEQ ID NOs: 1352 and 1296, (lix) SEQ ID NOs: 1353 and 1296, (lx) SEQ ID NOs: 1354 and 1296, (lxi) SEQ ID NOs: 1355 and 1296, (lxii) SEQ ID NOs: 1356 and 1296, (lxiii) SEQ ID NOs: 1357 and 1296, (lxiv) SEQ ID NOs: 1358 and 1296, (lxv) SEQ ID NOs: 1359 and 1296, (lxvi) SEQ ID NOs: 1360 and 1296, (lxvii) SEQ ID NOs: 1361 and 1296, (lxviii) SEQ ID NOs: 1362 and 1296, (lxix) SEQ ID NOs: 1363 and 1296, (lxx) SEQ ID NOs: 1364 and 1296, (lxxi) SEQ ID NOs: 1365 and 1296, (lxxii) SEQ ID NOs: 1366 and 1296, (lxxiii) SEQ ID NOs: 1367 and 1296, (lxxiv) SEQ ID NOs: 1368 and 1296, (lxxv) SEQ ID NOs: 1369 and 1296, (lxxvi) SEQ ID NOs: 1370 and 1296, (lxxvii) SEQ ID NOs: 1371 and 1296, (lxxviii) SEQ ID NOs: 1372 and 1296, (lxxix) SEQ ID NOs: 1373 and 1296, (lxxx) SEQ ID NOs: 1374 and 1296, (lxxxi) SEQ ID NOs: 1375 and 1296, (lxxxii) SEQ ID NOs: 1376 and 1296, (lxxxiii) SEQ ID NOs: 1377 and 1296, (lxxxix) SEQ ID NOs: 1378 and 1296, (lxxxv) SEQ ID NOs: 1379 and 1296, (lxxxvi) SEQ ID NOs: 1380 and 1296, (lxxxvii) SEQ ID NOs: 1381 and 1296, (lxxxviii) SEQ ID NOs: 1382 and 1296, (lxxxix) SEQ ID NOs: 1383 and 1296, (xc) SEQ ID NOs: 1384 and 1296, (xci) SEQ ID NOs: 1385 and 1296, (xcii) SEQ ID NOs: 1386 and 1296, and (xciii) SEQ ID NOs: 1387 and 1296, as shown in FIGS. 27, 28, 29A-29H, and 30A-30R, as well as those disclosed herein (see, e.g., Section (V)(B)(1) above).

[0481] Embodiment (A)(2): In some other further embodiments of an NKG2D NKE antibody comprising means for binding the ECD of a human TTA, the human TTA comprises human EGFR. Suitable variable heavy VH and variable light VL domains that bind to the ECD of human EGFR include, but are not limited to, VH/VL pairs selected from the group including: (i) SEQ ID NOs: 164 and 165, (ii) SEQ ID NOs: 166 and 167, (iii) SEQ ID NOs: 168 and 169, (iv) SEQ ID NOs: 170 and 171, (v) SEQ ID NOs: 172 and 173, (vi) SEQ ID NOs: 174 and 175, (vii) SEQ ID NOs: 176 and 177, (viii) SEQ ID NOs: 178 and 179, (ix) SEQ ID NOs: 180 and 181, (x) SEQ ID NOs: 182 and 183, (xi) SEQ ID NOs: 184 and 185, and (xii) SEQ ID NOs: 186 and 187, as shown in FIGS. 13A-13C, as well as those disclosed herein (see, e.g., Section (V)(B)(2) above).

[0482] Embodiment (A)(3): In some other further embodiments of an NKG2D NKE antibody comprising means for binding the ECD of a human TTA, the human TTA comprises human HER2. Suitable variable heavy VH and variable light VL domains that bind to the ECD of human HER2 include, but are not limited to, VH/VL pairs selected from the group including: (i) SEQ ID NOs: 275 and 276, (ii) SEQ ID NOs: 277 and 278, (iii) SEQ ID NOs: 279 and 280, (iv) SEQ ID NOs: 281 and 282, (v) SEQ ID NOs: 283 and 284, (vi) SEQ ID NOs: 285 and 286, and (vii) SEQ ID NOs: 287 and 288, as shown in FIGS. 20A-20B.

[0483] Embodiment (A)(4): In some other further embodiments of an NKG2D NKE antibody comprising means for binding the ECD of a human TTA, the human TTA comprises human CD19. Suitable variable heavy VH and variable light VL domains that bind to the ECD of human CD19 include, but are not limited to, VH/VL pairs selected from the group including: (i) SEQ ID NOs: 188 and 189, (ii) SEQ ID NOs: 190 and 191, (iii) SEQ ID NOs: 192 and 193, and (iv) SEQ ID NOs: 194 and 195, as shown in FIG. 14.

[0484] Embodiment (A)(5): In some other further embodiments of an NKG2D NKE antibody comprising means for binding the ECD of a human TTA, the human TTA comprises human CD20. Suitable variable heavy VH and variable light VL domains that bind to the ECD of human CD20 include, but are not limited to, VH/VL pairs selected from the group including: (i) SEQ ID NOs: 196 and 197, (ii) SEQ ID NOs: 198 and 199, (iii) SEQ ID NOs: 200 and 201, (iv) SEQ ID NOs: 202 and 203, (v) SEQ ID NOs: 204 and 205, (vi) SEQ ID NOs: 206 and 207, (vii) SEQ ID NOs: 208 and 209, (viii) SEQ ID NOs: 210 and 211, (ix) SEQ ID NOs: 212 and 213, (x) SEQ ID NOs: 214 and 215, (xi) SEQ ID NOs: 216 and 217, (xii) SEQ ID NOs: 218 and 219, (xiii) SEQ ID NOs: 220 and 221, (xiv) SEQ ID NOs: 222 and 223, and (xv) SEQ ID NOs: 224 and 225, as shown in FIGS. 15A-15C.

[0485] Embodiment (A)(6): In some other further embodiments of an NKG2D NKE antibody comprising means for binding the ECD of a human TTA, the human TTA comprises human CD123. Suitable variable heavy VH and variable light VL domains that bind to the ECD of human CD123 include, but are not limited to, VH/VL pairs selected from the group including: (i) SEQ ID NOs: 833 and 834, and (ii) SEQ ID NOs: 835 and 836, as shown in FIG. 23.

[0486] Embodiment (A)(7): In some other further embodiments of an NKG2D NKE antibody comprising means for binding the ECD of a human TTA, the human TTA comprises human CAIX. Suitable variable heavy VH and variable light VL domains that bind to the ECD of human CAIX include, but are not limited to, the pair of SEQ ID NOs: 831 and 832, as shown in FIG. 23, as well as those disclosed herein (see, e.g., Section (V)(B)(7) above).

[0487] Embodiment (A)(8): In some other further embodiments of an NKG2D NKE antibody comprising means for binding the ECD of a human TTA, the human TTA comprises human FLT3. Suitable variable heavy VH and variable light VL domains that bind to the ECD of human FLT3 include, but are not limited to, VH/VL pairs selected from the group including: (i) SEQ ID NOs: 267 and 268, (ii) SEQ ID NOs: 269 and 270, (iii) SEQ ID NOs: 271 and 272, (iv) SEQ ID NOs: 273 and 274, (v) SEQ ID NOs: 275 and 276, (vi) SEQ ID NOs: 277 and 278, (vii) SEQ ID NOs: 279 and 280, and (viii) SEQ ID NOs: 281 and 282, as shown in FIG. 19, as well as those disclosed herein (see, e.g., Section (V)(B)(8) above).

[0488] Embodiment (A)(9): In some other further embodiments of an NKG2D NKE antibody comprising means for binding the ECD of a human TTA, the human TTA comprises human MSLN. Suitable variable heavy VH and variable light VL domains that bind to the ECD of human MSLN include, but are not limited to, VH/VL pairs selected from the group including: (i) SEQ ID NOs: 289 and 293, (ii) SEQ ID NOs: 297 and 301, (iii) SEQ ID NOs: 305 and 309, (iv) SEQ ID NOs: 313 and 314, (v) SEQ ID NOs: 315 and 316, (vi) SEQ ID NOs: 317 and 318, (vii) SEQ ID NOs: 319 and 320, (viii) SEQ ID NOs: 321 and 322, (ix) SEQ ID NOs: 323 and 324, (x) SEQ ID NOs: 325 and 326, (xi) SEQ ID NOs: 327 and 328, (xii) SEQ ID NOs: 329 and 330, (xiii) SEQ ID NOs: 331 and 332, (xiv) SEQ ID NOs: 333 and 334, (xv) SEQ ID NOs: 335 and 336, (xvi) SEQ ID NOs: 337 and 338, (xvii) SEQ ID NOs: 339 and 340, (xviii) SEQ ID NOs: 341 and 342, (xix) SEQ ID NOs: 343 and 344, (xx) SEQ ID NOs: 345 and 346, (xxi) SEQ ID NOs: 347 and 348, (xxii) SEQ ID NOs: 349 and 350, (xxiii) SEQ ID NOs: 351 and 352, (xxiv) SEQ ID NOs: 353 and 354, (xxv) SEQ ID NOs: 355 and 356, (xxvi) SEQ ID NOs: 357 and 358, (xxvii) SEQ ID NOs: 359 and 360, (xxviii) SEQ ID NOs: 361 and 362, (xxix) SEQ ID NOs: 363 and 364, (xxx) SEQ ID NOs: 365 and 366, (xxxi) SEQ ID NOs: 367 and 368, (xxxii) SEQ ID NOs: 369 and 370, (xxxiii) SEQ ID NOs: 371 and 372, (xxxiv) SEQ ID NOs: 373 and 374, (xxxv) SEQ ID NOs: 375 and 376, (xxxvi) SEQ ID NOs: 377 and 378, (xxxvii) SEQ ID NOs: 379 and 380, (xxxviii) SEQ ID NOs: 381 and 382, (xxxix) SEQ ID NOs: 383 and 384, (xl) SEQ ID NOs: 385 and 386, (xli) SEQ ID NOs: 387 and 388, (xlii) SEQ ID NOs: 389 and 390, (xliii) SEQ ID NOs: 391 and 392, (xliv) SEQ ID NOs: 393 and 394, (xlv) SEQ ID NOs: 395 and 396, (xlvi) SEQ ID NOs: 397 and 398, (xlvii) SEQ ID NOs: 399 and 400, (xlviii) SEQ ID NOs: 401 and 402, (xlix) SEQ ID NOs: 403 and 404, (1) SEQ ID NOs: 405 and 406, (li) SEQ ID NOs: 405 and 408, (lii) SEQ ID NOs: 407 and 406, (liii) SEQ ID NOs: 407 and 408, (liv) SEQ ID NOs: 409 and 410, (lv) SEQ ID NOs: 411 and 412, (lvi) SEQ ID NOs: 413 and 414, (lvii) SEQ ID NOs: 415 and 416, (lviii) SEQ ID NOs: 417 and 418, (lix) SEQ ID NOs: 419 and 420, (lx) SEQ ID NOs: 421 and 422, (lxi) SEQ ID NOs: 423 and 424, (lxii) SEQ ID NOs: 425 and 426, (lxiii) SEQ ID NOs: 427 and 428, (lxiv) SEQ ID NOs: 429 and 430, (lxv) SEQ ID NOs: 431 and 432, (lxvi) SEQ ID NOs: 433 and 434, (lxvii) SEQ ID NOs: 435 and 436, (lxviii) SEQ ID NOs: 437 and 438, (lxix) SEQ ID NOs: 439 and 440, (lxx) SEQ ID NOs: 441 and 442, (lxxi) SEQ ID NOs: 443 and 444, (lxxii) SEQ ID NOs: 445 and 446, (lxxiii) SEQ ID NOs: 447 and 448, (lxxiv) SEQ ID NOs: 449 and 450, (lxxv) SEQ ID NOs: 451 and 452, (lxxvi) SEQ ID NOs: 453 and 454, (lxxvii) SEQ ID NOs: 455 and 456, (lxxviii) SEQ ID NOs: 457 and 458, (lxxix) SEQ ID NOs: 459 and 460, (lxxx) SEQ ID NOs: 461 and 462, (lxxxi) SEQ ID NOs: 463 and 464, (lxxxii) SEQ ID NOs: 465 and 466, (lxxxiii) SEQ ID NOs: 467 and 468, (lxxxix) SEQ ID NOs: 469 and 470, (lxxxv) SEQ ID NOs: 471 and 472, (lxxxvi) SEQ ID NOs: 473 and 474, (lxxxvii) SEQ ID NOs: 475 and 476, (lxxxviii) SEQ ID NOs: 477 and 478, (lxxxix) SEQ ID NOs: 479 and 480, (xc) SEQ ID NOs: 481 and 482, (xci) SEQ ID NOs: 483 and 484, (xcii) SEQ ID NOs: 485 and 486, (xciii) SEQ ID NOs: 487 and 488, (xciv) SEQ ID NOs: 489 and 490, (xcv) SEQ ID NOs: 491 and 492, (xcvi) SEQ ID NOs: 493 and 494, (xcvii) SEQ ID NOs: 495 and 496, (xcviii) SEQ ID NOs: 497 and 498, (xcix) SEQ ID NOs: 499 and 500, (c) SEQ ID NOs: 501 and 502, (ci) SEQ ID NOs: 503 and 504, (cii) SEQ ID NOs: 505 and 506, (ciii) SEQ ID NOs: 507 and 508, (civ) SEQ ID NOs: 509 and 510, (cv) SEQ ID NOs: 511 and 512, (cvi) SEQ ID NOs: 513 and 514, (cvii) SEQ ID NOs: 515 and 516, (cviii) SEQ ID NOs: 517 and 518, (cix) SEQ ID NOs: 519 and 520, (cx) SEQ ID NOs: 521 and 522, (cxi) SEQ ID NOs: 523 and 524, (cxii) SEQ ID NOs: 525 and 526, (cxiii) SEQ ID NOs: 527 and 528, (cxiv) SEQ ID NOs: 529 and 530, (cxv) SEQ ID NOs: 531 and 532, (cxvi) SEQ ID NOs: 533 and 534, (cxvii) SEQ ID NOs: 535 and 536, (cxviii) SEQ ID NOs: 537 and 538, (cxix) SEQ ID NOs: 539 and 540, (cxx) SEQ ID NOs: 541 and 542, (cxxi) SEQ ID NOs: 543 and 544, (cxxii) SEQ ID NOs: 545 and 546, (cxxiii) SEQ ID NOs: 547 and 548, (cxxiv) SEQ ID NOs: 549 and 550, (cxxv) SEQ ID NOs: 551 and 552, (cxxvi) SEQ ID NOs: 553 and 554, (cxxvii) SEQ ID NOs: 555 and 556, (cxxviii) SEQ ID NOs: 557 and 558, (cxxix) SEQ ID NOs: 559 and 560, (cxxx) SEQ ID NOs: 561 and 562, (cxxxi) SEQ ID NOs: 563 and 564, (cxxxii) SEQ ID NOs: 565 and 566, (cxxxiii) SEQ ID NOs: 567 and 568, (cxxxiv) SEQ ID NOs: 569 and 570, (cxxxv) SEQ ID NOs: 571 and 572, (cxxxvi) SEQ ID NOs: 573 and 574, (cxxxvii) SEQ ID NOs: 575 and 576, (cxxxviii) SEQ ID NOs: 577 and 578, (cxl) SEQ ID NOs: 579 and 580, (cxli) SEQ ID NOs: 581 and 582, (cxlii) SEQ ID NOs: 583 and 584, (cxliii) SEQ ID NOs: 585 and 586, (cxliv) SEQ ID NOs: 587 and 588, (cxlv) SEQ ID NOs: 589 and 590, (cxlvi) SEQ ID NOs: 591 and 592, (cxlvii) SEQ ID NOs: 593 and 594, (cxlviii) SEQ ID NOs: 595 and 596, (cxlix) SEQ ID NOs: 597 and 598, (cl) SEQ ID NOs: 599 and 600, (cli) SEQ ID NOs: 601 and 602, (clii) SEQ ID NOs: 603 and 604, (cliii) SEQ ID NOs: 605 and 606, (cliv) SEQ ID NOs: 607 and 608, (clv) SEQ ID NOs: 609 and 610, (clvi) SEQ ID NOs: 611 and 612, (clvii) SEQ ID NOs: 613 and 614, (clviii) SEQ ID NOs: 615 and 616, (clviii) SEQ ID NOs: 617 and 618, (clix) SEQ ID NOs: 619 and 620, (clx) SEQ ID NOs: 621 and 622, (clxi) SEQ ID NOs: 623 and 624, (clxii) SEQ ID NOs: 625 and 626, (clxiii) SEQ ID NOs: 627 and 628, (clxiv) SEQ ID NOs: 629 and 630, (clxv) SEQ ID NOs: 631 and 632, (clxvi) SEQ ID NOs: 633 and 634, (clxvii) SEQ ID NOs: 635 and 636, (clxviii) SEQ ID NOs: 637 and 638, and (clxix) any one of SEQ ID NOs: 639-649 and any one of SEQ ID NOs: 650-669, as shown in FIGS. 21A-21FF, as well as those disclosed herein (see, e.g., Section (V)(B)(9) above).

[0489] Embodiment (A)(10): In some other further embodiments of an NKG2D NKE antibody comprising means for binding the ECD of a human TTA, the human TTA comprises human Trop2. Suitable variable heavy VH and variable light VL domains that bind to the ECD of human Trop2 include, but are not limited to, VH/VL pairs selected from the group including: (i) SEQ ID NOs: 670 and 671, (ii) SEQ ID NOs: 672 and 673, (iii) SEQ ID NOs: 674 and 675, (iv) SEQ ID NOs: 676 and 677, (v) SEQ ID NOs: 678 and 679, (vi) SEQ ID NOs: 680 and 681, (vii) SEQ ID NOs: 682 and 683, (viii) SEQ ID NOs: 684 and 681, (ix) SEQ ID NOs: 685 and 686, (x) SEQ ID NOs: 687 and 688, (xi) SEQ ID NOs: 689 and 690, (xii) SEQ ID NOs: 691 and 692, (xiii) SEQ ID NOs: 693 and 694, (xiv) SEQ ID NOs: 695 and 696, (xv) SEQ ID NOs: 697 and 698, (xvi) SEQ ID NOs: 699 and 700, (xvii) SEQ ID NOs: 701 and 702, (xviii) SEQ ID NOs: 703 and 704, (xix) SEQ ID NOs: 705 and 706, (xx) SEQ ID NOs: 707 and 708, (xxi) SEQ ID NOs: 709 and 710, (xxii) SEQ ID NOs: 711 and 712, (xxiii) SEQ ID NOs: 713 and 714, (xxiv) SEQ ID NOs: 715 and 716, (xxv) SEQ ID NOs: 717 and 718, (xxvi) SEQ ID NOs: 719 and 720, (xxvii) SEQ ID NOs: 721 and 722, (xxviii) SEQ ID NOs: 723 and 724, (xxix) SEQ ID NOs: 725 and 726, (xxx) SEQ ID NOs: 727 and 728, (xxxi) SEQ ID NOs: 729 and 730, (xxxii) SEQ ID NOs: 731 and 732, (xxxiii) SEQ ID NOs: 733 and 734, (xxxiv) SEQ ID NOs: 735 and 736, (xxxv) SEQ ID NOs: 737 and 738, (xxxvi) SEQ ID NOs: 739 and 740, (xxxvii) SEQ ID NOs: 741 and 742, (xxxviii) SEQ ID NOs: 743 and 744, (xxxix) SEQ ID NOs: 745 and 746, (xl) SEQ ID NOs: 747 and 748, (xli) SEQ ID NOs: 749 and 750, (xlii) SEQ ID NOs: 751 and 752, (xliii) SEQ ID NOs: 753 and 754, (xliv) SEQ ID NOs: 755 and 756, (xlv) SEQ ID NOs: 757 and 758, (xlvi) SEQ ID NOs: 759 and 760, (xlvii) SEQ ID NOs: 761 and 762, (xlviii) SEQ ID NOs: 763 and 764, (xlix) SEQ ID NOs: 765 and 766, (1) SEQ ID NOs: 767 and 768, (li) SEQ ID NOs: 769 and 770, (lii) SEQ ID NOs: 771 and 772, (liii) SEQ ID NOs: 773 and 774, (liv) SEQ ID NOs: 775 and 776, (lv) SEQ ID NOs: 777 and 778, (lvi) SEQ ID NOs: 779 and 780, (lvii) SEQ ID NOs: 781 and 782, (lviii) SEQ ID NOs: 783 and 784, (lix) SEQ ID NOs: 785 and 786, (lx) SEQ ID NOs: 787 and 788, (lxi) SEQ ID NOs: 789 and 790, (lxii) SEQ ID NOs: 791 and 792, (lxiii) SEQ ID NOs: 793 and 794, (lxiv) SEQ ID NOs: 795 and 800, (lxv) SEQ ID NOs: 795 and 801, (lxvi) SEQ ID NOs: 795 and 802, (lxvii) SEQ ID NOs: 796 and 800, (lxviii) SEQ ID NOs: 796 and 801, (lxix) SEQ ID NOs: 796 and 802, (lxx) SEQ ID NOs: 797 and 800, (lxxi) SEQ ID NOs: 797 and 801, (lxxii) SEQ ID NOs: 797 and 802, (lxxiii) SEQ ID NOs: 798 and 800, (lxxiv) SEQ ID NOs: 798 and 801, (lxxv) SEQ ID NOs: 798 and 802, (lxxvi) SEQ ID NOs: 799 and 800, (lxxvii) SEQ ID NOs: 799 and 801, (lxxviii) SEQ ID NOs: 799 and 802, (lxxix) SEQ ID NOs: 803 and 806, (lxxx) SEQ ID NOs: 803 and 807, (lxxxi) SEQ ID NOs: 803 and 808, (lxxxii) SEQ ID NOs: 804 and 806, (lxxxiii) SEQ ID NOs: 804 and 807, (lxxxix) SEQ ID NOs: 804 and 808, (lxxxv) SEQ ID NOs: 805 and 806, (lxxxvi) SEQ ID NOs: 805 and 807, (lxxxvii) SEQ ID NOs: 805 and 808, (lxxxviii) SEQ ID NOs: 809 and 812, (lxxxix) SEQ ID NOs: 809 and 813, (xc) SEQ ID NOs: 810 and 812, (xci) SEQ ID NOs: 810 and 813, (xcii) SEQ ID NOs: 811 and 812, (xciii) SEQ ID NOs: 811 and 813, (xciv) SEQ ID NOs: 814 and 816, (xcv) SEQ ID NOs: 814 and 817, (xcvi) SEQ ID NOs: 814 and 818, (xcvii) SEQ ID NOs: 815 and 816, (xcviii) SEQ ID NOs: 815 and 817, (xcix) SEQ ID NOs: 815 and 818, (c) SEQ ID NOs: 819 and 824, (ci) SEQ ID NOs: 819 and 825, (cii) SEQ ID NOs: 819 and 826, (ciii) SEQ ID NOs: 819 and 827, (civ) SEQ ID NOs: 819 and 828, (cv) SEQ ID NOs: 820 and 824, (cvi) SEQ ID NOs: 820 and 825, (cvii) SEQ ID NOs: 820 and 826, (cviii) SEQ ID NOs: 820 and 827, (cix) SEQ ID NOs: 820 and 828, (cx) SEQ ID NOs: 821 and 824, (cxi) SEQ ID NOs: 821 and 825, (cxii) SEQ ID NOs: 821 and 826, (cxiii) SEQ ID NOs: 821 and 827, (cxiv) SEQ ID NOs: 821 and 828, (cxv) SEQ ID NOs: 822 and 824, (cxvi) SEQ ID NOs: 822 and 825, (cxvii) SEQ ID NOs: 822 and 826, (cxviii) SEQ ID NOs: 822 and 827, (cxix) SEQ ID NOs: 822 and 828, (cxx) SEQ ID NOs: 823 and 824, (cxxi) SEQ ID NOs: 823 and 825, (cxxii) SEQ ID NOs: 823 and 826, (cxxiii) SEQ ID NOs: 823 and 827, (cxxiv) SEQ ID NOs: 823 and 828, and (cxxv) SEQ ID NOs: 829 and 830, as shown in FIGS. 22A-22R, as well as those disclosed herein (see, e.g., Section (V)(B)(10) above).

[0490] Embodiment (A)(11): In some other further embodiments of an NKG2D NKE antibody comprising means for binding the ECD of a human TTA, the human TTA comprises human CEA. Suitable variable heavy VH and variable light VL domains that bind to the ECD of human CEA include, but are not limited to, VH/VL pairs selected from the group including: (i) SEQ ID NOs: 239 and 240, (ii) SEQ ID NOs: 241 and 242, (iii) SEQ ID NOs: 243 and 244, (iv) SEQ ID NOs: 245 and 246, (v) SEQ ID NOs: 247 and 248, (vi) SEQ ID NOs: 249 and 250, (vii) SEQ ID NOs: 251 and 252, (viii) SEQ ID NOs: 253 and 254, (ix) SEQ ID NOs: 255 and 256, (x) SEQ ID NOs: 257 and 258, (xi) SEQ ID NOs: 259 and 260, (xii) SEQ ID NOs: 261 and 262, (xiii) SEQ ID NOs: 263 and 264, and (xiv) SEQ ID NOs: 265 and 266, as shown in FIGS. 18A-18C, as well as those disclosed herein (see, e.g., Section (V)(B)(11) above).

[0491] Embodiment (A)(12): In some other further embodiments of an NKG2D NKE antibody comprising means for binding the ECD of a human TTA, the human TTA comprises human CLDN18.2. Suitable variable heavy VH and variable light VL domains that bind to the ECD of human CLDN18.2 include, but are not limited to, VH/VL pairs selected from the group including: (i) SEQ ID NOs: 226 and 229, (ii) SEQ ID NOs: 226 and 230, (iii) SEQ ID NOs: 227 and 229, (iv) SEQ ID NOs: 227 and 230, (v) SEQ ID NOs: 228 and 229, (vi) SEQ ID NOs: 228 and 230, and (vii) SEQ ID NOs: 231 and 232, as shown in FIG. 16, as well as those disclosed herein (see, e.g., Section (V)(B)(12) above).

[0492] Embodiment (A)(13): In some other further embodiments of an NKG2D NKE antibody comprising means for binding the ECD of a human TTA, the human TTA comprises human BCMA. Suitable variable heavy VH and variable light VL domains that bind to the ECD of human BCMA include, but are not limited to, VH/VL pairs selected from the group including: (i) SEQ ID NOs: 233 and 234, (ii) SEQ ID NOs: 235 and 236, (iii) SEQ ID NOs: 237 and 238, (iv) SEQ ID NOs: 12 and 16, (v) SEQ ID NOs: 22 and 26, (vi) SEQ ID NOs: 32 and 36, (vii) SEQ ID NOs: 42 and 46, (viii) SEQ ID NOs: 52 and 56, (ix) SEQ ID NOs: 62 and 66, and (x) SEQ ID NOs: 72 and 76, as shown in FIGS. 17A-17C, as well as those disclosed herein (see, e.g., Section (V)(B)(13) above).

[0493] Embodiment (A)(14): In some other further embodiments of an NKG2D NKE antibody comprising means for binding the ECD of a human TTA, the human TTA comprises human DLL3. Suitable variable heavy VH and variable light VL domains that bind to the ECD of human DLL3 include, but are not limited to, VH/VL pairs selected from the group including: (i) SEQ ID NOs: 837 and 838, (ii) SEQ ID NOs: 839 and 840, (iii) SEQ ID NOs: 841 and 842, (iv) SEQ ID NOs: 843 and 844, (v) SEQ ID NOs: 845 and 846, (vi) SEQ ID NOs: 847 and 848, (vii) SEQ ID NOs: 849 and 850, (viii) SEQ ID NOs: 851 and 852, (ix) SEQ ID NOs: 853 and 854, (x) SEQ ID NOs: 855 and 856, (xi) SEQ ID NOs: 857 and 858, (xii) SEQ ID NOs: 859 and 860, (xiii) SEQ ID NOs: 861 and 862, (xiv) SEQ ID NOs: 863 and 864, (xv) SEQ ID NOs: 865 and 866, (xvi) SEQ ID NOs: 867 and 868, and (xvii) SEQ ID NOs: 869 and 870, as shown in FIGS. 24A-24C, as well as those disclosed herein (see, e.g., Section (V)(B)(14) above).

[0494] Embodiment (A)(15): In some other further embodiments of an NKG2D NKE antibody comprising means for binding the ECD of a human TTA, the human TTA comprises human PD-1. Suitable variable heavy VH and variable light VL domains that bind to the ECD of human PD-1 include, but are not limited to, VH/VL pairs selected from the group including: (i) SEQ ID NOs: 871 and 872, (ii) SEQ ID NOs: 873 and 874, (iii) SEQ ID NOs: 875 and 876, (iv) SEQ ID NOs: 877 and 878, (v) SEQ ID NOs: 879 and 880, (vi) SEQ ID NOs: 881 and 882, (vii) SEQ ID NOs: 883 and 884, (viii) SEQ ID NOs: 885 and 886, (ix) SEQ ID NOs: 887 and 888, (x) SEQ ID NOs: 889 and 890, (xi) SEQ ID NOs: 891 and 892, (xii) SEQ ID NOs: 893 and 894, (xiii) SEQ ID NOs: 895 and 896, (xiv) SEQ ID NOs: 897 and 898, (xv) SEQ ID NOs: 899 and 900, (xvi) SEQ ID NOs: 901 and 902, (xvii) SEQ ID NOs: 903 and 904, (xviii) SEQ ID NOs: 905 and 906, (xix) SEQ ID NOs: 907 and 908, and (xx) SEQ ID NOs: 909 and 910, as shown in FIGS. 25A-25G, as well as those disclosed herein (see, e.g., Section (V)(B)(15) above).

[0495] Embodiment (A)(16): In some other further embodiments of an NKG2D NKE antibody comprising means for binding the ECD of a human TTA, the human TTA comprises human ANOL. Suitable variable heavy VH and variable light VL domains that bind to the ECD of human ANO1 include, but are not limited to, the sequences disclosed herein (see, e.g., Section (V)(B)(16) above).

[0496] Embodiment (A)(17): In some other further embodiments of an NKG2D NKE antibody comprising means for binding the ECD of a human TTA, the human TTA comprises human CD22. Suitable variable heavy VH and variable light VL domains that bind to the ECD of human CD22 include, but are not limited to, the sequences disclosed herein (see, e.g., Section (V)(B)(17) above).

[0497] Embodiment (A)(18): In some other further embodiments of an NKG2D NKE antibody comprising means for binding the ECD of a human TTA, the human TTA comprises human CD38. Suitable variable heavy VH and variable light VL domains that bind to the ECD of human CD38 include, but are not limited to, the sequences disclosed herein (see, e.g., Section (V)(B)(18) above).

[0498] Embodiment (B): In some embodiments, the NKE antibody comprises: a) means for binding the extracellular domain of human NKp46; and b) a variant IgG1 Fc dimeric domain comprising an amino acid substitution as compared to human IgG1, wherein the variant has increased in vitro binding to the human FcγRIIIa receptor as compared to human IgG1. Suitable variable heavy VH and variable light VL domains that bind to the ECD of human NKp46 include, but are not limited to, VH/VL pairs selected from the group including: (i) SEQ ID NOs: 133 and 134, (ii) SEQ ID NOs: 135 and 136, (iii) SEQ ID NOs: 137 and 138, (iv) SEQ ID NOs: 139 and 140, (v) SEQ ID NOs: 141 and 142, (vi) SEQ ID NOs: 143 and 144, (vii) SEQ ID NOs: 146 and 147, (viii) SEQ ID NOs: 148 and 149, (ix) SEQ ID NOs: 150 and 151, (x) SEQ ID NOs: 152 and 153, (xi) SEQ ID NOs: 154 and 155, and (xii) SEQ ID NOs: 156 and 157, as shown in FIGS. 11A-11C. In some further embodiments, the NKE antibody (such as the NKp46 NKE antibody described herein) further comprises means for binding the ECD of a human TTA selected from a group including: (1) B7H3, (2) EGFR, (3) HER2, (4) CD19, (5) CD20, (6) CD123, (7) CAIX, (8) FLT3, (9) MSLN, (10) Trop2, (11) CEA, (12) CLDN18.2, (13) BCMA, (14) DLL3, (15) PD-1, (16) ANO1, (17) CD22, and (18) CD38, as described in further detail below. In still some further embodiments, the variant IgG1 Fc domain comprises an amino acid substitution selected from a group including: S239D, S239E, S239D/I332E, I332E, and 1332D. In still some other further embodiments, the variant IgG1 Fc domain comprises an amino acid substitution selected from a group including: S239D, S239E, I332D, I332E, S239D/I332E, S239E/I332E, S239D/I332D, S239E/I332D, S239D/A330L/I332E, S239D/A330L, A330L/I332E, F243L, F243L/R292P/Y300L/V305I/P396L, 332I/P247I/A339Q, S298A/E333A/K334A, V264I/I332E, S298A, S298A/I332E, S298A/E333A/K334A, S239Q/I332E, D265G, Y296Q, S298T, L328I/I332E, V264T, V266I, S239D/I332N, S239E/I332N, S239E/I332Q, S239N/I332E, S239Q/I332D, K326E, A330Y/I332E, V264I/A330Y/I332E, A330L/I332E, V264I/A330L/I332E, L234D, L234E, L234I, L235D, L235T, A330F, L328V/I332E, S239Q/V264I/I332E, S239E/V264I/A330Y/I332E, K274R, N276Y, S324T, K334I, K334F, L234I/L235D, L235D/S239D/A330Y/I332E, S239D/V240I/A330Y/I332E, S239D/V264T/A330Y/I332E, S239D/K326E/A330Y/I332E, S239D/K326T/A330Y/I332E, E293R, S324G, E272R, P227G, G236S, D221K, H224E, K246H, D249Y, R255Y, E258H, T260H, G281D, E283H, E283L, V284E, S239D/E272I/I332E, S239D/E272Y/A330L/I332E, S239D/E272I/A330L/I332E, S239D/K274E/I332E, S239D/K326T/I332E, S239D/K326E/I332E and S239D/K274E/A330L/I332E.

[0499] Embodiment (B)(1): In some further embodiments of the NKE antibody comprising means for binding the ECD of human NKp46 and means for binding the ECD of a human TTA, the human TTA comprises human B7H3. Suitable variable heavy VH and variable light VL domains that bind to the ECD of human B7H3 include, but are not limited to, VH/VL pairs selected from the group including: (i) SEQ ID NOs: 1260 and 1264, (ii) SEQ ID NOs: 1268 and 1272, (iii) SEQ ID NOs: 1276 and 1280, (iv) SEQ ID NOs: 1284 and 1288, (v) SEQ ID NOs: 1292 and 1296, (vi) SEQ ID NOs: 1300 and 1296, (vii) SEQ ID NOs: 1301 and 1296, (viii) SEQ ID NOs: 1302 and 1296, (ix) SEQ ID NOs: 1303 and 1296, (x) SEQ ID NOs: 1304 and 1296, (xi) SEQ ID NOs: 1305 and 1296, (xii) SEQ ID NOs: 1306 and 1296, (xiii) SEQ ID NOs: 1307 and 1296, (xiv) SEQ ID NOs: 1308 and 1296, (xv) SEQ ID NOs: 1309 and 1296, (xvi) SEQ ID NOs: 1310 and 1296, (xvii) SEQ ID NOs: 1311 and 1296, (xviii) SEQ ID NOs: 1312 and 1296, (xix) SEQ ID NOs: 1313 and 1296, (xx) SEQ ID NOs: 1314 and 1296, (xxi) SEQ ID NOs: 1315 and 1296, (xxii) SEQ ID NOs: 1316 and 1296, (xxiii) SEQ ID NOs: 1317 and 1296, (xxiv) SEQ ID NOs: 1318 and 1296, (xxv) SEQ ID NOs: 1319 and 1296, (xxvi) SEQ ID NOs: 1320 and 1296, (xxvii) SEQ ID NOs: 1321 and 1296, (xxviii) SEQ ID NOs: 1322 and 1296, (xxix) SEQ ID NOs: 1323 and 1296, (xxx) SEQ ID NOs: 1324 and 1296, (xxxi) SEQ ID NOs: 1325 and 1296, (xxxii) SEQ ID NOs: 1326 and 1296, (xxxiii) SEQ ID NOs: 1327 and 1296, (xxxiv) SEQ ID NOs: 1328 and 1296, (xxxv) SEQ ID NOs: 1329 and 1296, (xxxvi) SEQ ID NOs: 1330 and 1296, (xxxvii) SEQ ID NOs: 1331 and 1296, (xxxviii) SEQ ID NOs: 1332 and 1296, (xxxix) SEQ ID NOs: 1333 and 1296, (xl) SEQ ID NOs: 1334 and 1296, (xli) SEQ ID NOs: 1335 and 1296, (xlii) SEQ ID NOs: 1336 and 1296, (xliii) SEQ ID NOs: 1337 and 1296, (xliv) SEQ ID NOs: 1338 and 1296, (xlv) SEQ ID NOs: 1339 and 1296, (xlvi) SEQ ID NOs: 1340 and 1296, (xlvii) SEQ ID NOs: 1341 and 1296, (xlviii) SEQ ID NOs: 1342 and 1296, (xlix) SEQ ID NOs: 1343 and 1296, (1) SEQ ID NOs: 1344 and 1296, (li) SEQ ID NOs: 1345 and 1296, (lii) SEQ ID NOs: 1346 and 1296, (liii) SEQ ID NOs: 1347 and 1296, (liv) SEQ ID NOs: 1348 and 1296, (lv) SEQ ID NOs: 1349 and 1296, (lvi) SEQ ID NOs: 1350 and 1296, (lvii) SEQ ID NOs: 1351 and 1296, (lviii) SEQ ID NOs: 1352 and 1296, (lix) SEQ ID NOs: 1353 and 1296, (lx) SEQ ID NOs: 1354 and 1296, (lxi) SEQ ID NOs: 1355 and 1296, (lxii) SEQ ID NOs: 1356 and 1296, (lxiii) SEQ ID NOs: 1357 and 1296, (lxiv) SEQ ID NOs: 1358 and 1296, (lxv) SEQ ID NOs: 1359 and 1296, (lxvi) SEQ ID NOs: 1360 and 1296, (lxvii) SEQ ID NOs: 1361 and 1296, (lxviii) SEQ ID NOs: 1362 and 1296, (lxix) SEQ ID NOs: 1363 and 1296, (lxx) SEQ ID NOs: 1364 and 1296, (lxxi) SEQ ID NOs: 1365 and 1296, (lxxii) SEQ ID NOs: 1366 and 1296, (lxxiii) SEQ ID NOs: 1367 and 1296, (lxxiv) SEQ ID NOs: 1368 and 1296, (lxxv) SEQ ID NOs: 1369 and 1296, (lxxvi) SEQ ID NOs: 1370 and 1296, (lxxvii) SEQ ID NOs: 1371 and 1296, (lxxviii) SEQ ID NOs: 1372 and 1296, (lxxix) SEQ ID NOs: 1373 and 1296, (lxxx) SEQ ID NOs: 1374 and 1296, (lxxxi) SEQ ID NOs: 1375 and 1296, (lxxxii) SEQ ID NOs: 1376 and 1296, (lxxxiii) SEQ ID NOs: 1377 and 1296, (lxxxix) SEQ ID NOs: 1378 and 1296, (lxxxv) SEQ ID NOs: 1379 and 1296, (lxxxvi) SEQ ID NOs: 1380 and 1296, (lxxxvii) SEQ ID NOs: 1381 and 1296, (lxxxviii) SEQ ID NOs: 1382 and 1296, (lxxxix) SEQ ID NOs: 1383 and 1296, (xc) SEQ ID NOs: 1384 and 1296, (xci) SEQ ID NOs: 1385 and 1296, (xcii) SEQ ID NOs: 1386 and 1296, and (xciii) SEQ ID NOs: 1387 and 1296, as shown in FIGS. 27, 28, 29A-29H, and 30A-30R, as well as those disclosed herein (see, e.g., Section (V)(B)(1) above).

[0500] Embodiment (B)(2): In some other further embodiments of an NKp46 NKE antibody comprising means for binding the ECD of a human TTA, the human TTA comprises human EGFR. Suitable variable heavy VH and variable light VL domains that bind to the ECD of human EGFR include, but are not limited to, VH/VL pairs selected from the group including: (i) SEQ ID NOs: 164 and 165, (ii) SEQ ID NOs: 166 and 167, (iii) SEQ ID NOs: 168 and 169, (iv) SEQ ID NOs: 170 and 171, (v) SEQ ID NOs: 172 and 173, (vi) SEQ ID NOs: 174 and 175, (vii) SEQ ID NOs: 176 and 177, (viii) SEQ ID NOs: 178 and 179, (ix) SEQ ID NOs: 180 and 181, (x) SEQ ID NOs: 182 and 183, (xi) SEQ ID NOs: 184 and 185, and (xii) SEQ ID NOs: 186 and 187, as shown in FIGS. 13A-13C, as well as those disclosed herein (see, e.g., Section (V)(B)(2) above).

[0501] Embodiment (B)(3): In some other further embodiments of an NKp46 NKE antibody comprising means for binding the ECD of a human TTA, the human TTA comprises human HER2. Suitable variable heavy VH and variable light VL domains that bind to the ECD of human HER2 include, but are not limited to, VH/VL pairs selected from the group including: (i) SEQ ID NOs: 275 and 276, (ii) SEQ ID NOs: 277 and 278, (iii) SEQ ID NOs: 279 and 280, (iv) SEQ ID NOs: 281 and 282, (v) SEQ ID NOs: 283 and 284, (vi) SEQ ID NOs: 285 and 286, and (vii) SEQ ID NOs: 287 and 288, as shown in FIGS. 20A-20B.

[0502] Embodiment (B)(4): In some other further embodiment of an NKp46 NKE antibody comprising means for binding the ECD of a human TTA s, the human TTA comprises human CD19. Suitable variable heavy VH and variable light VL domains that bind to the ECD of human CD19 include, but are not limited to, VH/VL pairs selected from the group including: (i) SEQ ID NOs: 188 and 189, (ii) SEQ ID NOs: 190 and 191, (iii) SEQ ID NOs: 192 and 193, and (iv) SEQ ID NOs: 194 and 195, as shown in FIG. 14.

[0503] Embodiment (B)(5): In some other further embodiments of an NKp46 NKE antibody comprising means for binding the ECD of a human TTA, the human TTA comprises human CD20. Suitable variable heavy VH and variable light VL domains that bind to the ECD of human CD20 include, but are not limited to, VH/VL pairs selected from the group including: (i) SEQ ID NOs: 196 and 197, (ii) SEQ ID NOs: 198 and 199, (iii) SEQ ID NOs: 200 and 201, (iv) SEQ ID NOs: 202 and 203, (v) SEQ ID NOs: 204 and 205, (vi) SEQ ID NOs: 206 and 207, (vii) SEQ ID NOs: 208 and 209, (viii) SEQ ID NOs: 210 and 211, (ix) SEQ ID NOs: 212 and 213, (x) SEQ ID NOs: 214 and 215, (xi) SEQ ID NOs: 216 and 217, (xii) SEQ ID NOs: 218 and 219, (xiii) SEQ ID NOs: 220 and 221, (xiv) SEQ ID NOs: 222 and 223, and (xv) SEQ ID NOs: 224 and 225, as shown in FIGS. 15A-15C.

[0504] Embodiment (B)(6): In some other further embodiments of an NKp46 NKE antibody comprising means for binding the ECD of a human TTA, the human TTA comprises human CD123. Suitable variable heavy VH and variable light VL domains that bind to the ECD of human CD123 include, but are not limited to, VH/VL pairs selected from the group including: (i) SEQ ID NOs: 833 and 834, and (ii) SEQ ID NOs: 835 and 836, as shown in FIG. 23.

[0505] Embodiment (B)(7): In some other further embodiments of an NKp46 NKE antibody comprising means for binding the ECD of a human TTA, the human TTA comprises human CAIX. Suitable variable heavy VH and variable light VL domains that bind to the ECD of human CAIX include, but are not limited to, the pair of SEQ ID NOs: 831 and 832, as shown in FIG. 23, as well as those disclosed herein (see, e.g., Section (V)(B)(7) above).

[0506] Embodiment (B)(8): In some other further embodiments of an NKp46 NKE antibody comprising means for binding the ECD of a human TTA, the human TTA comprises human FLT3. Suitable variable heavy VH and variable light VL domains that bind to the ECD of human FLT3 include, but are not limited to, VH/VL pairs selected from the group including: (i) SEQ ID NOs: 267 and 268, (ii) SEQ ID NOs: 269 and 270, (iii) SEQ ID NOs: 271 and 272, (iv) SEQ ID NOs: 273 and 274, (v) SEQ ID NOs: 275 and 276, (vi) SEQ ID NOs: 277 and 278, (vii) SEQ ID NOs: 279 and 280, and (viii) SEQ ID NOs: 281 and 282, as shown in FIG. 19, as well as those disclosed herein (see, e.g., Section (V)(B)(8) above).

[0507] Embodiment (B)(9): In some other further embodiments of an NKp46 NKE antibody comprising means for binding the ECD of a human TTA, the human TTA comprises human MSLN. Suitable variable heavy VH and variable light VL domains that bind to the ECD of human MSLN include, but are not limited to, VH/VL pairs selected from the group including: (i) SEQ ID NOs: 289 and 293, (ii) SEQ ID NOs: 297 and 301, (iii) SEQ ID NOs: 305 and 309, (iv) SEQ ID NOs: 313 and 314, (v) SEQ ID NOs: 315 and 316, (vi) SEQ ID NOs: 317 and 318, (vii) SEQ ID NOs: 319 and 320, (viii) SEQ ID NOs: 321 and 322, (ix) SEQ ID NOs: 323 and 324, (x) SEQ ID NOs: 325 and 326, (xi) SEQ ID NOs: 327 and 328, (xii) SEQ ID NOs: 329 and 330, (xiii) SEQ ID NOs: 331 and 332, (xiv) SEQ ID NOs: 333 and 334, (xv) SEQ ID NOs: 335 and 336, (xvi) SEQ ID NOs: 337 and 338, (xvii) SEQ ID NOs: 339 and 340, (xviii) SEQ ID NOs: 341 and 342, (xix) SEQ ID NOs: 343 and 344, (xx) SEQ ID NOs: 345 and 346, (xxi) SEQ ID NOs: 347 and 348, (xxii) SEQ ID NOs: 349 and 350, (xxiii) SEQ ID NOs: 351 and 352, (xxiv) SEQ ID NOs: 353 and 354, (xxv) SEQ ID NOs: 355 and 356, (xxvi) SEQ ID NOs: 357 and 358, (xxvii) SEQ ID NOs: 359 and 360, (xxviii) SEQ ID NOs: 361 and 362, (xxix) SEQ ID NOs: 363 and 364, (xxx) SEQ ID NOs: 365 and 366, (xxxi) SEQ ID NOs: 367 and 368, (xxxii) SEQ ID NOs: 369 and 370, (xxxiii) SEQ ID NOs: 371 and 372, (xxxiv) SEQ ID NOs: 373 and 374, (xxxv) SEQ ID NOs: 375 and 376, (xxxvi) SEQ ID NOs: 377 and 378, (xxxvii) SEQ ID NOs: 379 and 380, (xxxviii) SEQ ID NOs: 381 and 382, (xxxix) SEQ ID NOs: 383 and 384, (xl) SEQ ID NOs: 385 and 386, (xli) SEQ ID NOs: 387 and 388, (xlii) SEQ ID NOs: 389 and 390, (xliii) SEQ ID NOs: 391 and 392, (xliv) SEQ ID NOs: 393 and 394, (xlv) SEQ ID NOs: 395 and 396, (xlvi) SEQ ID NOs: 397 and 398, (xlvii) SEQ ID NOs: 399 and 400, (xlviii) SEQ ID NOs: 401 and 402, (xlix) SEQ ID NOs: 403 and 404, (1) SEQ ID NOs: 405 and 406, (li) SEQ ID NOs: 405 and 408, (lii) SEQ ID NOs: 407 and 406, (liii) SEQ ID NOs: 407 and 408, (liv) SEQ ID NOs: 409 and 410, (lv) SEQ ID NOs: 411 and 412, (lvi) SEQ ID NOs: 413 and 414, (lvii) SEQ ID NOs: 415 and 416, (lviii) SEQ ID NOs: 417 and 418, (lix) SEQ ID NOs: 419 and 420, (lx) SEQ ID NOs: 421 and 422, (lxi) SEQ ID NOs: 423 and 424, (lxii) SEQ ID NOs: 425 and 426, (lxiii) SEQ ID NOs: 427 and 428, (lxiv) SEQ ID NOs: 429 and 430, (lxv) SEQ ID NOs: 431 and 432, (lxvi) SEQ ID NOs: 433 and 434, (lxvii) SEQ ID NOs: 435 and 436, (lxviii) SEQ ID NOs: 437 and 438, (lxix) SEQ ID NOs: 439 and 440, (lxx) SEQ ID NOs: 441 and 442, (lxxi) SEQ ID NOs: 443 and 444, (lxxii) SEQ ID NOs: 445 and 446, (lxxiii) SEQ ID NOs: 447 and 448, (lxxiv) SEQ ID NOs: 449 and 450, (lxxv) SEQ ID NOs: 451 and 452, (lxxvi) SEQ ID NOs: 453 and 454, (lxxvii) SEQ ID NOs: 455 and 456, (lxxviii) SEQ ID NOs: 457 and 458, (lxxix) SEQ ID NOs: 459 and 460, (lxxx) SEQ ID NOs: 461 and 462, (lxxxi) SEQ ID NOs: 463 and 464, (lxxxii) SEQ ID NOs: 465 and 466, (lxxxiii) SEQ ID NOs: 467 and 468, (lxxxix) SEQ ID NOs: 469 and 470, (lxxxv) SEQ ID NOs: 471 and 472, (lxxxvi) SEQ ID NOs: 473 and 474, (lxxxvii) SEQ ID NOs: 475 and 476, (lxxxviii) SEQ ID NOs: 477 and 478, (lxxxix) SEQ ID NOs: 479 and 480, (xc) SEQ ID NOs: 481 and 482, (xci) SEQ ID NOs: 483 and 484, (xcii) SEQ ID NOs: 485 and 486, (xciii) SEQ ID NOs: 487 and 488, (xciv) SEQ ID NOs: 489 and 490, (xcv) SEQ ID NOs: 491 and 492, (xcvi) SEQ ID NOs: 493 and 494, (xcvii) SEQ ID NOs: 495 and 496, (xcviii) SEQ ID NOs: 497 and 498, (xcix) SEQ ID NOs: 499 and 500, (c) SEQ ID NOs: 501 and 502, (ci) SEQ ID NOs: 503 and 504, (cii) SEQ ID NOs: 505 and 506, (ciii) SEQ ID NOs: 507 and 508, (civ) SEQ ID NOs: 509 and 510, (cv) SEQ ID NOs: 511 and 512, (cvi) SEQ ID NOs: 513 and 514, (cvii) SEQ ID NOs: 515 and 516, (cviii) SEQ ID NOs: 517 and 518, (cix) SEQ ID NOs: 519 and 520, (cx) SEQ ID NOs: 521 and 522, (cxi) SEQ ID NOs: 523 and 524, (cxii) SEQ ID NOs: 525 and 526, (cxiii) SEQ ID NOs: 527 and 528, (cxiv) SEQ ID NOs: 529 and 530, (cxv) SEQ ID NOs: 531 and 532, (cxvi) SEQ ID NOs: 533 and 534, (cxvii) SEQ ID NOs: 535 and 536, (cxviii) SEQ ID NOs: 537 and 538, (cxix) SEQ ID NOs: 539 and 540, (cxx) SEQ ID NOs: 541 and 542, (cxxi) SEQ ID NOs: 543 and 544, (cxxii) SEQ ID NOs: 545 and 546, (cxxiii) SEQ ID NOs: 547 and 548, (cxxiv) SEQ ID NOs: 549 and 550, (cxxv) SEQ ID NOs: 551 and 552, (cxxvi) SEQ ID NOs: 553 and 554, (cxxvii) SEQ ID NOs: 555 and 556, (cxxviii) SEQ ID NOs: 557 and 558, (cxxix) SEQ ID NOs: 559 and 560, (cxxx) SEQ ID NOs: 561 and 562, (cxxxi) SEQ ID NOs: 563 and 564, (cxxxii) SEQ ID NOs: 565 and 566, (cxxxiii) SEQ ID NOs: 567 and 568, (cxxxiv) SEQ ID NOs: 569 and 570, (cxxxv) SEQ ID NOs: 571 and 572, (cxxxvi) SEQ ID NOs: 573 and 574, (cxxxvii) SEQ ID NOs: 575 and 576, (cxxxviii) SEQ ID NOs: 577 and 578, (cxl) SEQ ID NOs: 579 and 580, (cxli) SEQ ID NOs: 581 and 582, (cxlii) SEQ ID NOs: 583 and 584, (cxliii) SEQ ID NOs: 585 and 586, (cxliv) SEQ ID NOs: 587 and 588, (cxlv) SEQ ID NOs: 589 and 590, (cxlvi) SEQ ID NOs: 591 and 592, (cxlvii) SEQ ID NOs: 593 and 594, (cxlviii) SEQ ID NOs: 595 and 596, (cxlix) SEQ ID NOs: 597 and 598, (cl) SEQ ID NOs: 599 and 600, (cli) SEQ ID NOs: 601 and 602, (clii) SEQ ID NOs: 603 and 604, (cliii) SEQ ID NOs: 605 and 606, (cliv) SEQ ID NOs: 607 and 608, (clv) SEQ ID NOs: 609 and 610, (clvi) SEQ ID NOs: 611 and 612, (clvii) SEQ ID NOs: 613 and 614, (clviii) SEQ ID NOs: 615 and 616, (clviii) SEQ ID NOs: 617 and 618, (clix) SEQ ID NOs: 619 and 620, (clx) SEQ ID NOs: 621 and 622, (clxi) SEQ ID NOs: 623 and 624, (clxii) SEQ ID NOs: 625 and 626, (clxiii) SEQ ID NOs: 627 and 628, (clxiv) SEQ ID NOs: 629 and 630, (clxv) SEQ ID NOs: 631 and 632, (clxvi) SEQ ID NOs: 633 and 634, (clxvii) SEQ ID NOs: 635 and 636, (clxviii) SEQ ID NOs: 637 and 638, and (clxix) any one of SEQ ID NOs: 639-649 and any one of SEQ ID NOs: 650-669, as shown in FIGS. 21A-21FF, as well as those disclosed herein (see, e.g., Section (V)(B)(9) above).

[0508] Embodiment (B)(10): In some other further embodiments of an NKp46 NKE antibody comprising means for binding the ECD of a human TTA, the human TTA comprises human Trop2. Suitable variable heavy VH and variable light VL domains that bind to the ECD of human Trop2 include, but are not limited to, VH/VL pairs selected from the group including: (i) SEQ ID NOs: 670 and 671, (ii) SEQ ID NOs: 672 and 673, (iii) SEQ ID NOs: 674 and 675, (iv) SEQ ID NOs: 676 and 677, (v) SEQ ID NOs: 678 and 679, (vi) SEQ ID NOs: 680 and 681, (vii) SEQ ID NOs: 682 and 683, (viii) SEQ ID NOs: 684 and 681, (ix) SEQ ID NOs: 685 and 686, (x) SEQ ID NOs: 687 and 688, (xi) SEQ ID NOs: 689 and 690, (xii) SEQ ID NOs: 691 and 692, (xiii) SEQ ID NOs: 693 and 694, (xiv) SEQ ID NOs: 695 and 696, (xv) SEQ ID NOs: 697 and 698, (xvi) SEQ ID NOs: 699 and 700, (xvii) SEQ ID NOs: 701 and 702, (xviii) SEQ ID NOs: 703 and 704, (xix) SEQ ID NOs: 705 and 706, (xx) SEQ ID NOs: 707 and 708, (xxi) SEQ ID NOs: 709 and 710, (xxii) SEQ ID NOs: 711 and 712, (xxiii) SEQ ID NOs: 713 and 714, (xxiv) SEQ ID NOs: 715 and 716, (xxv) SEQ ID NOs: 717 and 718, (xxvi) SEQ ID NOs: 719 and 720, (xxvii) SEQ ID NOs: 721 and 722, (xxviii) SEQ ID NOs: 723 and 724, (xxix) SEQ ID NOs: 725 and 726, (xxx) SEQ ID NOs: 727 and 728, (xxxi) SEQ ID NOs: 729 and 730, (xxxii) SEQ ID NOs: 731 and 732, (xxxiii) SEQ ID NOs: 733 and 734, (xxxiv) SEQ ID NOs: 735 and 736, (xxxv) SEQ ID NOs: 737 and 738, (xxxvi) SEQ ID NOs: 739 and 740, (xxxvii) SEQ ID NOs: 741 and 742, (xxxviii) SEQ ID NOs: 743 and 744, (xxxix) SEQ ID NOs: 745 and 746, (xl) SEQ ID NOs: 747 and 748, (xli) SEQ ID NOs: 749 and 750, (xlii) SEQ ID NOs: 751 and 752, (xliii) SEQ ID NOs: 753 and 754, (xliv) SEQ ID NOs: 755 and 756, (xlv) SEQ ID NOs: 757 and 758, (xlvi) SEQ ID NOs: 759 and 760, (xlvii) SEQ ID NOs: 761 and 762, (xlviii) SEQ ID NOs: 763 and 764, (xlix) SEQ ID NOs: 765 and 766, (1) SEQ ID NOs: 767 and 768, (li) SEQ ID NOs: 769 and 770, (lii) SEQ ID NOs: 771 and 772, (liii) SEQ ID NOs: 773 and 774, (liv) SEQ ID NOs: 775 and 776, (lv) SEQ ID NOs: 777 and 778, (lvi) SEQ ID NOs: 779 and 780, (lvii) SEQ ID NOs: 781 and 782, (lviii) SEQ ID NOs: 783 and 784, (lix) SEQ ID NOs: 785 and 786, (lx) SEQ ID NOs: 787 and 788, (lxi) SEQ ID NOs: 789 and 790, (lxii) SEQ ID NOs: 791 and 792, (lxiii) SEQ ID NOs: 793 and 794, (lxiv) SEQ ID NOs: 795 and 800, (lxv) SEQ ID NOs: 795 and 801, (lxvi) SEQ ID NOs: 795 and 802, (lxvii) SEQ ID NOs: 796 and 800, (lxviii) SEQ ID NOs: 796 and 801, (lxix) SEQ ID NOs: 796 and 802, (lxx) SEQ ID NOs: 797 and 800, (lxxi) SEQ ID NOs: 797 and 801, (lxxii) SEQ ID NOs: 797 and 802, (lxxiii) SEQ ID NOs: 798 and 800, (lxxiv) SEQ ID NOs: 798 and 801, (lxxv) SEQ ID NOs: 798 and 802, (lxxvi) SEQ ID NOs: 799 and 800, (lxxvii) SEQ ID NOs: 799 and 801, (lxxviii) SEQ ID NOs: 799 and 802, (lxxix) SEQ ID NOs: 803 and 806, (lxxx) SEQ ID NOs: 803 and 807, (lxxxi) SEQ ID NOs: 803 and 808, (lxxxii) SEQ ID NOs: 804 and 806, (lxxxiii) SEQ ID NOs: 804 and 807, (lxxxix) SEQ ID NOs: 804 and 808, (lxxxv) SEQ ID NOs: 805 and 806, (lxxxvi) SEQ ID NOs: 805 and 807, (lxxxvii) SEQ ID NOs: 805 and 808, (lxxxviii) SEQ ID NOs: 809 and 812, (lxxxix) SEQ ID NOs: 809 and 813, (xc) SEQ ID NOs: 810 and 812, (xci) SEQ ID NOs: 810 and 813, (xcii) SEQ ID NOs: 811 and 812, (xciii) SEQ ID NOs: 811 and 813, (xciv) SEQ ID NOs: 814 and 816, (xcv) SEQ ID NOs: 814 and 817, (xcvi) SEQ ID NOs: 814 and 818, (xcvii) SEQ ID NOs: 815 and 816, (xcviii) SEQ ID NOs: 815 and 817, (xcix) SEQ ID NOs: 815 and 818, (c) SEQ ID NOs: 819 and 824, (ci) SEQ ID NOs: 819 and 825, (cii) SEQ ID NOs: 819 and 826, (ciii) SEQ ID NOs: 819 and 827, (civ) SEQ ID NOs: 819 and 828, (cv) SEQ ID NOs: 820 and 824, (cvi) SEQ ID NOs: 820 and 825, (cvii) SEQ ID NOs: 820 and 826, (cviii) SEQ ID NOs: 820 and 827, (cix) SEQ ID NOs: 820 and 828, (cx) SEQ ID NOs: 821 and 824, (cxi) SEQ ID NOs: 821 and 825, (cxii) SEQ ID NOs: 821 and 826, (cxiii) SEQ ID NOs: 821 and 827, (cxiv) SEQ ID NOs: 821 and 828, (cxv) SEQ ID NOs: 822 and 824, (cxvi) SEQ ID NOs: 822 and 825, (cxvii) SEQ ID NOs: 822 and 826, (cxviii) SEQ ID NOs: 822 and 827, (cxix) SEQ ID NOs: 822 and 828, (cxx) SEQ ID NOs: 823 and 824, (cxxi) SEQ ID NOs: 823 and 825, (cxxii) SEQ ID NOs: 823 and 826, (cxxiii) SEQ ID NOs: 823 and 827, (cxxiv) SEQ ID NOs: 823 and 828, and (cxxv) SEQ ID NOs: 829 and 830, as shown in FIGS. 22A-22R, as well as those disclosed herein (see, e.g., Section (V)(B)(10) above).

[0509] Embodiment (B)(11): In some other further embodiments, the human TTA comprises human CEA. Suitable variable heavy VH and variable light VL domains that bind to the ECD of human CEA include, but are not limited to, VH/VL pairs selected from the group including: (i) SEQ ID NOs: 239 and 240, (ii) SEQ ID NOs: 241 and 242, (iii) SEQ ID NOs: 243 and 244, (iv) SEQ ID NOs: 245 and 246, (v) SEQ ID NOs: 247 and 248, (vi) SEQ ID NOs: 249 and 250, (vii) SEQ ID NOs: 251 and 252, (viii) SEQ ID NOs: 253 and 254, (ix) SEQ ID NOs: 255 and 256, (x) SEQ ID NOs: 257 and 258, (xi) SEQ ID NOs: 259 and 260, (xii) SEQ ID NOs: 261 and 262, (xiii) SEQ ID NOs: 263 and 264, and (xiv) SEQ ID NOs: 265 and 266, as shown in FIGS. 18A-18C, as well as those disclosed herein (see, e.g., Section (V)(B)(11) above).

[0510] Embodiment (B)(12): In some other further embodiments of an NKp46 NKE antibody comprising means for binding the ECD of a human TTA, the human TTA comprises human CLDN18.2. Suitable variable heavy VH and variable light VL domains that bind to the ECD of human CLDN18.2 include, but are not limited to, VH/VL pairs selected from the group including: (i) SEQ ID NOs: 226 and 229, (ii) SEQ ID NOs: 226 and 230, (iii) SEQ ID NOs: 227 and 229, (iv) SEQ ID NOs: 227 and 230, (v) SEQ ID NOs: 228 and 229, (vi) SEQ ID NOs: 228 and 230, and (vii) SEQ ID NOs: 231 and 232, as shown in FIG. 16, as well as those disclosed herein (see, e.g., Section (V)(B)(12) above).

[0511] Embodiment (B)(13): In some other further embodiments of an NKp46 NKE antibody comprising means for binding the ECD of a human TTA, the human TTA comprises human BCMA. Suitable variable heavy VH and variable light VL domains that bind to the ECD of human BCMA include, but are not limited to, VH/VL pairs selected from the group including: (i) SEQ ID NOs: 233 and 234, (ii) SEQ ID NOs: 235 and 236, (iii) SEQ ID NOs: 237 and 238, (iv) SEQ ID NOs: 12 and 16, (v) SEQ ID NOs: 22 and 26, (vi) SEQ ID NOs: 32 and 36, (vii) SEQ ID NOs: 42 and 46, (viii) SEQ ID NOs: 52 and 56, (ix) SEQ ID NOs: 62 and 66, and (x) SEQ ID NOs: 72 and 76, as shown in FIGS. 17A-17C, as well as those disclosed herein (see, e.g., Section (V)(B)(13) above).

[0512] Embodiment (B)(14): In some other further embodiments of an NKp46 NKE antibody comprising means for binding the ECD of a human TTA, the human TTA comprises human DLL3. Suitable variable heavy VH and variable light VL domains that bind to the ECD of human DLL3 include, but are not limited to, VH/VL pairs selected from the group including: (i) SEQ ID NOs: 837 and 838, (ii) SEQ ID NOs: 839 and 840, (iii) SEQ ID NOs: 841 and 842, (iv) SEQ ID NOs: 843 and 844, (v) SEQ ID NOs: 845 and 846, (vi) SEQ ID NOs: 847 and 848, (vii) SEQ ID NOs: 849 and 850, (viii) SEQ ID NOs: 851 and 852, (ix) SEQ ID NOs: 853 and 854, (x) SEQ ID NOs: 855 and 856, (xi) SEQ ID NOs: 857 and 858, (xii) SEQ ID NOs: 859 and 860, (xiii) SEQ ID NOs: 861 and 862, (xiv) SEQ ID NOs: 863 and 864, (xv) SEQ ID NOs: 865 and 866, (xvi) SEQ ID NOs: 867 and 868, and (xvii) SEQ ID NOs: 869 and 870, as shown in FIGS. 24A-24C, as well as those disclosed herein (see, e.g., Section (V)(B)(14) above).

[0513] Embodiment (B)(15): In some other further embodiments of an NKp46 NKE antibody comprising means for binding the ECD of a human TTA, the human TTA comprises human PD-1. Suitable variable heavy VH and variable light VL domains that bind to the ECD of human PD-1 include, but are not limited to, VH/VL pairs selected from the group including: (i) SEQ ID NOs: 871 and 872, (ii) SEQ ID NOs: 873 and 874, (iii) SEQ ID NOs: 875 and 876, (iv) SEQ ID NOs: 877 and 878, (v) SEQ ID NOs: 879 and 880, (vi) SEQ ID NOs: 881 and 882, (vii) SEQ ID NOs: 883 and 884, (viii) SEQ ID NOs: 885 and 886, (ix) SEQ ID NOs: 887 and 888, (x) SEQ ID NOs: 889 and 890, (xi) SEQ ID NOs: 891 and 892, (xii) SEQ ID NOs: 893 and 894, (xiii) SEQ ID NOs: 895 and 896, (xiv) SEQ ID NOs: 897 and 898, (xv) SEQ ID NOs: 899 and 900, (xvi) SEQ ID NOs: 901 and 902, (xvii) SEQ ID NOs: 903 and 904, (xviii) SEQ ID NOs: 905 and 906, (xix) SEQ ID NOs: 907 and 908, and (xx) SEQ ID NOs: 909 and 910, as shown in FIGS. 25A-25G, as well as those disclosed herein (see, e.g., Section (V)(B)(15) above).

[0514] Embodiment (B)(16): In some other further embodiments of an NKp46 NKE antibody comprising means for binding the ECD of a human TTA, the human TTA comprises human ANOL. Suitable variable heavy VH and variable light VL domains that bind to the ECD of human ANO1 include, but are not limited to, the sequences disclosed herein (see, e.g., Section (V)(B)(16) above).

[0515] Embodiment (B)(17): In some other further embodiments of an NKp46 NKE antibody comprising means for binding the ECD of a human TTA, the human TTA comprises human CD22. Suitable variable heavy VH and variable light VL domains that bind to the ECD of human CD22 include, but are not limited to, the sequences disclosed herein (see, e.g., Section (V)(B)(17) above).

[0516] Embodiment (B)(18): In some other further embodiments of an NKp46 NKE antibody comprising means for binding the ECD of a human TTA, the human TTA comprises human CD38. Suitable variable heavy VH and variable light VL domains that bind to the ECD of human CD38 include, but are not limited to, the sequences disclosed herein (see, e.g., Section (V)(B)(18) above).

[0517] Embodiment (C): In some embodiments, the NKE antibody comprises: a) means for binding the extracellular domain of human NKp30; and b) a variant IgG1 Fc dimeric domain comprising an amino acid substitution as compared to human IgG1, wherein the variant has increased in vitro binding to the human FcγRIIIa receptor as compared to human IgG1. Suitable variable heavy VH and variable light VL domains that bind to the ECD of human NKp30 include, but are not limited to, VH/VL pairs selected from the group including: (i) SEQ ID NOs: 158 and 159, (ii) SEQ ID NOs: 160 and 161, and (iii) SEQ ID NOs: 162 and 163, as shown in FIGS. 12, as well as those disclosed herein. In some further embodiments, the NKE antibody (such as the NKp30 NKE antibody described herein) further comprises means for binding the ECD of a human TTA selected from a group including: (1) B7H3, (2) EGFR, (3) HER2, (4) CD19, (5) CD20, (6) CD123, (7) CAIX, (8) FLT3, (9) MSLN, (10) Trop2, (11) CEA, (12) CLDN18.2, (13) BCMA, (14) DLL3, (15) PD-1, (16) ANO1, (17) CD22, and (18) CD38, as described in further detail below. In still some further embodiments, the variant IgG1 Fc domain comprises an amino acid substitution selected from a group including: S239D, S239E, S239D/I332E, I332E, and I332D. In still some other further embodiments, the variant IgG1 Fc domain comprises an amino acid substitution selected from a group including: S239D, S239E, I332D, I332E, S239D/I332E, S239E/I332E, S239D/I332D, S239E/I332D, S239D/A330L/I332E, S239D/A330L, A330L/I332E, F243L, F243L/R292P/Y300L/V305I/P396L, 332I/P247I/A339Q, S298A/E333A/K334A, V264I/I332E, S298A, S298A/I332E, S298A/E333A/K334A, S239Q/I332E, D265G, Y296Q, S298T, L328I/I332E, V264T, V266I, S239D/I332N, S239E/I332N, S239E/I332Q, S239N/I332E, S239Q/I332D, K326E, A330Y/I332E, V264I/A330Y/I332E, A330L/I332E, V264I/A330L/I332E, L234D, L234E, L234I, L235D, L235T, A330F, L328V/I332E, S239Q/V264I/I332E, S239E/V264I/A330Y/I332E, K274R, N276Y, S324T, K334I, K334F, L234I/L235D, L235D/S239D/A330Y/I332E, S239D/V240I/A330Y/I332E, S239D/V264T/A330Y/I332E, S239D/K326E/A330Y/I332E, S239D/K326T/A330Y/I332E, E293R, S324G, E272R, P227G, G236S, D221K, H224E, K246H, D249Y, R255Y, E258H, T260H, G281D, E283H, E283L, V284E, S239D/E272I/I332E, S239D/E272Y/A330L/I332E, S239D/E272I/A330L/I332E, S239D/K274E/I332E, S239D/K326T/I332E, S239D/K326E/I332E and S239D/K274E/A330L/I332E.

[0518] Embodiment (C)(1): In some further embodiments of an NKp30 NKE antibody comprising means for binding the ECD of a human TTA, the human TTA comprises human B7H3. Suitable variable heavy VH and variable light VL domains that bind to the ECD of human B7H3 include, but are not limited to, VH/VL pairs selected from the group including: (i) SEQ ID NOs: 1260 and 1264, (ii) SEQ ID NOs: 1268 and 1272, (iii) SEQ ID NOs: 1276 and 1280, (iv) SEQ ID NOs: 1284 and 1288, (v) SEQ ID NOs: 1292 and 1296, (vi) SEQ ID NOs: 1300 and 1296, (vii) SEQ ID NOs: 1301 and 1296, (viii) SEQ ID NOs: 1302 and 1296, (ix) SEQ ID NOs: 1303 and 1296, (x) SEQ ID NOs: 1304 and 1296, (xi) SEQ ID NOs: 1305 and 1296, (xii) SEQ ID NOs: 1306 and 1296, (xiii) SEQ ID NOs: 1307 and 1296, (xiv) SEQ ID NOs: 1308 and 1296, (xv) SEQ ID NOs: 1309 and 1296, (xvi) SEQ ID NOs: 1310 and 1296, (xvii) SEQ ID NOs: 1311 and 1296, (xviii) SEQ ID NOs: 1312 and 1296, (xix) SEQ ID NOs: 1313 and 1296, (xx) SEQ ID NOs: 1314 and 1296, (xxi) SEQ ID NOs: 1315 and 1296, (xxii) SEQ ID NOs: 1316 and 1296, (xxiii) SEQ ID NOs: 1317 and 1296, (xxiv) SEQ ID NOs: 1318 and 1296, (xxv) SEQ ID NOs: 1319 and 1296, (xxvi) SEQ ID NOs: 1320 and 1296, (xxvii) SEQ ID NOs: 1321 and 1296, (xxviii) SEQ ID NOs: 1322 and 1296, (xxix) SEQ ID NOs: 1323 and 1296, (xxx) SEQ ID NOs: 1324 and 1296, (xxxi) SEQ ID NOs: 1325 and 1296, (xxxii) SEQ ID NOs: 1326 and 1296, (xxxiii) SEQ ID NOs: 1327 and 1296, (xxxiv) SEQ ID NOs: 1328 and 1296, (xxxv) SEQ ID NOs: 1329 and 1296, (xxxvi) SEQ ID NOs: 1330 and 1296, (xxxvii) SEQ ID NOs: 1331 and 1296, (xxxviii) SEQ ID NOs: 1332 and 1296, (xxxix) SEQ ID NOs: 1333 and 1296, (xl) SEQ ID NOs: 1334 and 1296, (xli) SEQ ID NOs: 1335 and 1296, (xlii) SEQ ID NOs: 1336 and 1296, (xliii) SEQ ID NOs: 1337 and 1296, (xliv) SEQ ID NOs: 1338 and 1296, (xlv) SEQ ID NOs: 1339 and 1296, (xlvi) SEQ ID NOs: 1340 and 1296, (xlvii) SEQ ID NOs: 1341 and 1296, (xlviii) SEQ ID NOs: 1342 and 1296, (xlix) SEQ ID NOs: 1343 and 1296, (1) SEQ ID NOs: 1344 and 1296, (li) SEQ ID NOs: 1345 and 1296, (lii) SEQ ID NOs: 1346 and 1296, (liii) SEQ ID NOs: 1347 and 1296, (liv) SEQ ID NOs: 1348 and 1296, (lv) SEQ ID NOs: 1349 and 1296, (lvi) SEQ ID NOs: 1350 and 1296, (lvii) SEQ ID NOs: 1351 and 1296, (lviii) SEQ ID NOs: 1352 and 1296, (lix) SEQ ID NOs: 1353 and 1296, (lx) SEQ ID NOs: 1354 and 1296, (lxi) SEQ ID NOs: 1355 and 1296, (lxii) SEQ ID NOs: 1356 and 1296, (lxiii) SEQ ID NOs: 1357 and 1296, (lxiv) SEQ ID NOs: 1358 and 1296, (lxv) SEQ ID NOs: 1359 and 1296, (lxvi) SEQ ID NOs: 1360 and 1296, (lxvii) SEQ ID NOs: 1361 and 1296, (lxviii) SEQ ID NOs: 1362 and 1296, (lxix) SEQ ID NOs: 1363 and 1296, (lxx) SEQ ID NOs: 1364 and 1296, (lxxi) SEQ ID NOs: 1365 and 1296, (lxxii) SEQ ID NOs: 1366 and 1296, (lxxiii) SEQ ID NOs: 1367 and 1296, (lxxiv) SEQ ID NOs: 1368 and 1296, (lxxv) SEQ ID NOs: 1369 and 1296, (lxxvi) SEQ ID NOs: 1370 and 1296, (lxxvii) SEQ ID NOs: 1371 and 1296, (lxxviii) SEQ ID NOs: 1372 and 1296, (lxxix) SEQ ID NOs: 1373 and 1296, (lxxx) SEQ ID NOs: 1374 and 1296, (lxxxi) SEQ ID NOs: 1375 and 1296, (lxxxii) SEQ ID NOs: 1376 and 1296, (lxxxiii) SEQ ID NOs: 1377 and 1296, (lxxxix) SEQ ID NOs: 1378 and 1296, (lxxxv) SEQ ID NOs: 1379 and 1296, (lxxxvi) SEQ ID NOs: 1380 and 1296, (lxxxvii) SEQ ID NOs: 1381 and 1296, (lxxxviii) SEQ ID NOs: 1382 and 1296, (lxxxix) SEQ ID NOs: 1383 and 1296, (xc) SEQ ID NOs: 1384 and 1296, (xci) SEQ ID NOs: 1385 and 1296, (xcii) SEQ ID NOs: 1386 and 1296, and (xciii) SEQ ID NOs: 1387 and 1296, as shown in FIGS. 27, 28, 29A-29H, and 30A-30R, as well as those disclosed herein (see, e.g., Section (V)(B)(1) above).

[0519] Embodiment (C)(2): In some other further embodiments of an NKp30 NKE antibody comprising means for binding the ECD of a human TTA, the human TTA comprises human EGFR. Suitable variable heavy VH and variable light VL domains that bind to the ECD of human EGFR include, but are not limited to, VH/VL pairs selected from the group including: (i) SEQ ID NOs: 164 and 165, (ii) SEQ ID NOs: 166 and 167, (iii) SEQ ID NOs: 168 and 169, (iv) SEQ ID NOs: 170 and 171, (v) SEQ ID NOs: 172 and 173, (vi) SEQ ID NOs: 174 and 175, (vii) SEQ ID NOs: 176 and 177, (viii) SEQ ID NOs: 178 and 179, (ix) SEQ ID NOs: 180 and 181, (x) SEQ ID NOs: 182 and 183, (xi) SEQ ID NOs: 184 and 185, and (xii) SEQ ID NOs: 186 and 187, as shown in FIGS. 13A-13C, as well as those disclosed herein (see, e.g., Section (V)(B)(2) above).

[0520] Embodiment (C)(3): In some other further embodiments of an NKp30 NKE antibody comprising means for binding the ECD of a human TTA, the human TTA comprises human HER2. Suitable variable heavy VH and variable light VL domains that bind to the ECD of human HER2 include, but are not limited to, VH/VL pairs selected from the group including: (i) SEQ ID NOs: 275 and 276, (ii) SEQ ID NOs: 277 and 278, (iii) SEQ ID NOs: 279 and 280, (iv) SEQ ID NOs: 281 and 282, (v) SEQ ID NOs: 283 and 284, (vi) SEQ ID NOs: 285 and 286, and (vii) SEQ ID NOs: 287 and 288, as shown in FIGS. 20A-20B.

[0521] Embodiment (C)(4): In some other further embodiments of an NKp30 NKE antibody comprising means for binding the ECD of a human TTA, the human TTA comprises human CD19. Suitable variable heavy VH and variable light VL domains that bind to the ECD of human CD19 include, but are not limited to, VH/VL pairs selected from the group including: (i) SEQ ID NOs: 188 and 189, (ii) SEQ ID NOs: 190 and 191, (iii) SEQ ID NOs: 192 and 193, and (iv) SEQ ID NOs: 194 and 195, as shown in FIG. 14.

[0522] Embodiment (C)(5): In some other further embodiments of an NKp30 NKE antibody comprising means for binding the ECD of a human TTA, the human TTA comprises human CD20. Suitable variable heavy VH and variable light VL domains that bind to the ECD of human CD20 include, but are not limited to, VH/VL pairs selected from the group including: (i) SEQ ID NOs: 196 and 197, (ii) SEQ ID NOs: 198 and 199, (iii) SEQ ID NOs: 200 and 201, (iv) SEQ ID NOs: 202 and 203, (v) SEQ ID NOs: 204 and 205, (vi) SEQ ID NOs: 206 and 207, (vii) SEQ ID NOs: 208 and 209, (viii) SEQ ID NOs: 210 and 211, (ix) SEQ ID NOs: 212 and 213, (x) SEQ ID NOs: 214 and 215, (xi) SEQ ID NOs: 216 and 217, (xii) SEQ ID NOs: 218 and 219, (xiii) SEQ ID NOs: 220 and 221, (xiv) SEQ ID NOs: 222 and 223, and (xv) SEQ ID NOs: 224 and 225, as shown in FIGS. 15A-15C.

[0523] Embodiment (C)(6): In some other further embodiments of an NKp30 NKE antibody comprising means for binding the ECD of a human TTA, the human TTA comprises human CD123. Suitable variable heavy VH and variable light VL domains that bind to the ECD of human CD123 include, but are not limited to, VH/VL pairs selected from the group including: (i) SEQ ID NOs: 833 and 834, and (ii) SEQ ID NOs: 835 and 836, as shown in FIG. 23.

[0524] Embodiment (C)(7): In some other further embodiments of an NKp30 NKE antibody comprising means for binding the ECD of a human TTA, the human TTA comprises human CAIX. Suitable variable heavy VH and variable light VL domains that bind to the ECD of human CAIX include, but are not limited to, the pair of SEQ ID NOs: 831 and 832, as shown in FIG. 23, as well as those disclosed herein (see, e.g., Section (V)(B)(7) above).

[0525] Embodiment (C)(8): In some other further embodiments of an NKp30 NKE antibody comprising means for binding the ECD of a human TTA, the human TTA comprises human FLT3. Suitable variable heavy VH and variable light VL domains that bind to the ECD of human FLT3 include, but are not limited to, VH/VL pairs selected from the group including: (i) SEQ ID NOs: 267 and 268, (ii) SEQ ID NOs: 269 and 270, (iii) SEQ ID NOs: 271 and 272, (iv) SEQ ID NOs: 273 and 274, (v) SEQ ID NOs: 275 and 276, (vi) SEQ ID NOs: 277 and 278, (vii) SEQ ID NOs: 279 and 280, and (viii) SEQ ID NOs: 281 and 282, as shown in FIG. 19, as well as those disclosed herein (see, e.g., Section (V)(B)(8) above).

[0526] Embodiment (C)(9): In some other further embodiments of an NKp30 NKE antibody comprising means for binding the ECD of a human TTA, the human TTA comprises human MSLN. Suitable variable heavy VH and variable light VL domains that bind to the ECD of human MSLN include, but are not limited to, VH/VL pairs selected from the group including: (i) SEQ ID NOs: 289 and 293, (ii) SEQ ID NOs: 297 and 301, (iii) SEQ ID NOs: 305 and 309, (iv) SEQ ID NOs: 313 and 314, (v) SEQ ID NOs: 315 and 316, (vi) SEQ ID NOs: 317 and 318, (vii) SEQ ID NOs: 319 and 320, (viii) SEQ ID NOs: 321 and 322, (ix) SEQ ID NOs: 323 and 324, (x) SEQ ID NOs: 325 and 326, (xi) SEQ ID NOs: 327 and 328, (xii) SEQ ID NOs: 329 and 330, (xiii) SEQ ID NOs: 331 and 332, (xiv) SEQ ID NOs: 333 and 334, (xv) SEQ ID NOs: 335 and 336, (xvi) SEQ ID NOs: 337 and 338, (xvii) SEQ ID NOs: 339 and 340, (xviii) SEQ ID NOs: 341 and 342, (xix) SEQ ID NOs: 343 and 344, (xx) SEQ ID NOs: 345 and 346, (xxi) SEQ ID NOs: 347 and 348, (xxii) SEQ ID NOs: 349 and 350, (xxiii) SEQ ID NOs: 351 and 352, (xxiv) SEQ ID NOs: 353 and 354, (xxv) SEQ ID NOs: 355 and 356, (xxvi) SEQ ID NOs: 357 and 358, (xxvii) SEQ ID NOs: 359 and 360, (xxviii) SEQ ID NOs: 361 and 362, (xxix) SEQ ID NOs: 363 and 364, (xxx) SEQ ID NOs: 365 and 366, (xxxi) SEQ ID NOs: 367 and 368, (xxxii) SEQ ID NOs: 369 and 370, (xxxiii) SEQ ID NOs: 371 and 372, (xxxiv) SEQ ID NOs: 373 and 374, (xxxv) SEQ ID NOs: 375 and 376, (xxxvi) SEQ ID NOs: 377 and 378, (xxxvii) SEQ ID NOs: 379 and 380, (xxxviii) SEQ ID NOs: 381 and 382, (xxxix) SEQ ID NOs: 383 and 384, (xl) SEQ ID NOs: 385 and 386, (xli) SEQ ID NOs: 387 and 388, (xlii) SEQ ID NOs: 389 and 390, (xliii) SEQ ID NOs: 391 and 392, (xliv) SEQ ID NOs: 393 and 394, (xlv) SEQ ID NOs: 395 and 396, (xlvi) SEQ ID NOs: 397 and 398, (xlvii) SEQ ID NOs: 399 and 400, (xlviii) SEQ ID NOs: 401 and 402, (xlix) SEQ ID NOs: 403 and 404, (1) SEQ ID NOs: 405 and 406, (li) SEQ ID NOs: 405 and 408, (lii) SEQ ID NOs: 407 and 406, (liii) SEQ ID NOs: 407 and 408, (liv) SEQ ID NOs: 409 and 410, (lv) SEQ ID NOs: 411 and 412, (lvi) SEQ ID NOs: 413 and 414, (lvii) SEQ ID NOs: 415 and 416, (lviii) SEQ ID NOs: 417 and 418, (lix) SEQ ID NOs: 419 and 420, (lx) SEQ ID NOs: 421 and 422, (lxi) SEQ ID NOs: 423 and 424, (lxii) SEQ ID NOs: 425 and 426, (lxiii) SEQ ID NOs: 427 and 428, (lxiv) SEQ ID NOs: 429 and 430, (lxv) SEQ ID NOs: 431 and 432, (lxvi) SEQ ID NOs: 433 and 434, (lxvii) SEQ ID NOs: 435 and 436, (lxviii) SEQ ID NOs: 437 and 438, (lxix) SEQ ID NOs: 439 and 440, (lxx) SEQ ID NOs: 441 and 442, (lxxi) SEQ ID NOs: 443 and 444, (lxxii) SEQ ID NOs: 445 and 446, (lxxiii) SEQ ID NOs: 447 and 448, (lxxiv) SEQ ID NOs: 449 and 450, (lxxv) SEQ ID NOs: 451 and 452, (lxxvi) SEQ ID NOs: 453 and 454, (lxxvii) SEQ ID NOs: 455 and 456, (lxxviii) SEQ ID NOs: 457 and 458, (lxxix) SEQ ID NOs: 459 and 460, (lxxx) SEQ ID NOs: 461 and 462, (lxxxi) SEQ ID NOs: 463 and 464, (lxxxii) SEQ ID NOs: 465 and 466, (lxxxiii) SEQ ID NOs: 467 and 468, (lxxxix) SEQ ID NOs: 469 and 470, (lxxxv) SEQ ID NOs: 471 and 472, (lxxxvi) SEQ ID NOs: 473 and 474, (lxxxvii) SEQ ID NOs: 475 and 476, (lxxxviii) SEQ ID NOs: 477 and 478, (lxxxix) SEQ ID NOs: 479 and 480, (xc) SEQ ID NOs: 481 and 482, (xci) SEQ ID NOs: 483 and 484, (xcii) SEQ ID NOs: 485 and 486, (xciii) SEQ ID NOs: 487 and 488, (xciv) SEQ ID NOs: 489 and 490, (xcv) SEQ ID NOs: 491 and 492, (xcvi) SEQ ID NOs: 493 and 494, (xcvii) SEQ ID NOs: 495 and 496, (xcviii) SEQ ID NOs: 497 and 498, (xcix) SEQ ID NOs: 499 and 500, (c) SEQ ID NOs: 501 and 502, (ci) SEQ ID NOs: 503 and 504, (cii) SEQ ID NOs: 505 and 506, (ciii) SEQ ID NOs: 507 and 508, (civ) SEQ ID NOs: 509 and 510, (cv) SEQ ID NOs: 511 and 512, (cvi) SEQ ID NOs: 513 and 514, (cvii) SEQ ID NOs: 515 and 516, (cviii) SEQ ID NOs: 517 and 518, (cix) SEQ ID NOs: 519 and 520, (cx) SEQ ID NOs: 521 and 522, (cxi) SEQ ID NOs: 523 and 524, (cxii) SEQ ID NOs: 525 and 526, (cxiii) SEQ ID NOs: 527 and 528, (cxiv) SEQ ID NOs: 529 and 530, (cxv) SEQ ID NOs: 531 and 532, (cxvi) SEQ ID NOs: 533 and 534, (cxvii) SEQ ID NOs: 535 and 536, (cxviii) SEQ ID NOs: 537 and 538, (cxix) SEQ ID NOs: 539 and 540, (cxx) SEQ ID NOs: 541 and 542, (cxxi) SEQ ID NOs: 543 and 544, (cxxii) SEQ ID NOs: 545 and 546, (cxxiii) SEQ ID NOs: 547 and 548, (cxxiv) SEQ ID NOs: 549 and 550, (cxxv) SEQ ID NOs: 551 and 552, (cxxvi) SEQ ID NOs: 553 and 554, (cxxvii) SEQ ID NOs: 555 and 556, (cxxviii) SEQ ID NOs: 557 and 558, (cxxix) SEQ ID NOs: 559 and 560, (cxxx) SEQ ID NOs: 561 and 562, (cxxxi) SEQ ID NOs: 563 and 564, (cxxxii) SEQ ID NOs: 565 and 566, (cxxxiii) SEQ ID NOs: 567 and 568, (cxxxiv) SEQ ID NOs: 569 and 570, (cxxxv) SEQ ID NOs: 571 and 572, (cxxxvi) SEQ ID NOs: 573 and 574, (cxxxvii) SEQ ID NOs: 575 and 576, (cxxxviii) SEQ ID NOs: 577 and 578, (cxl) SEQ ID NOs: 579 and 580, (cxli) SEQ ID NOs: 581 and 582, (cxlii) SEQ ID NOs: 583 and 584, (cxliii) SEQ ID NOs: 585 and 586, (cxliv) SEQ ID NOs: 587 and 588, (cxlv) SEQ ID NOs: 589 and 590, (cxlvi) SEQ ID NOs: 591 and 592, (cxlvii) SEQ ID NOs: 593 and 594, (cxlviii) SEQ ID NOs: 595 and 596, (cxlix) SEQ ID NOs: 597 and 598, (cl) SEQ ID NOs: 599 and 600, (cli) SEQ ID NOs: 601 and 602, (clii) SEQ ID NOs: 603 and 604, (cliii) SEQ ID NOs: 605 and 606, (cliv) SEQ ID NOs: 607 and 608, (clv) SEQ ID NOs: 609 and 610, (clvi) SEQ ID NOs: 611 and 612, (clvii) SEQ ID NOs: 613 and 614, (clviii) SEQ ID NOs: 615 and 616, (clviii) SEQ ID NOs: 617 and 618, (clix) SEQ ID NOs: 619 and 620, (clx) SEQ ID NOs: 621 and 622, (clxi) SEQ ID NOs: 623 and 624, (clxii) SEQ ID NOs: 625 and 626, (clxiii) SEQ ID NOs: 627 and 628, (clxiv) SEQ ID NOs: 629 and 630, (clxv) SEQ ID NOs: 631 and 632, (clxvi) SEQ ID NOs: 633 and 634, (clxvii) SEQ ID NOs: 635 and 636, (clxviii) SEQ ID NOs: 637 and 638, and (clxix) any one of SEQ ID NOs: 639-649 and any one of SEQ ID NOs: 650-669, as shown in FIGS. 21A-21FF, as well as those disclosed herein (see, e.g., Section (V)(B)(9) above).

[0527] Embodiment (C)(10): In some other further embodiments of an NKp30 NKE antibody comprising means for binding the ECD of a human TTA, the human TTA comprises human Trop2. Suitable variable heavy VH and variable light VL domains that bind to the ECD of human Trop2 include, but are not limited to, VH/VL pairs selected from the group including: (i) SEQ ID NOs: 670 and 671, (ii) SEQ ID NOs: 672 and 673, (iii) SEQ ID NOs: 674 and 675, (iv) SEQ ID NOs: 676 and 677, (v) SEQ ID NOs: 678 and 679, (vi) SEQ ID NOs: 680 and 681, (vii) SEQ ID NOs: 682 and 683, (viii) SEQ ID NOs: 684 and 681, (ix) SEQ ID NOs: 685 and 686, (x) SEQ ID NOs: 687 and 688, (xi) SEQ ID NOs: 689 and 690, (xii) SEQ ID NOs: 691 and 692, (xiii) SEQ ID NOs: 693 and 694, (xiv) SEQ ID NOs: 695 and 696, (xv) SEQ ID NOs: 697 and 698, (xvi) SEQ ID NOs: 699 and 700, (xvii) SEQ ID NOs: 701 and 702, (xviii) SEQ ID NOs: 703 and 704, (xix) SEQ ID NOs: 705 and 706, (xx) SEQ ID NOs: 707 and 708, (xxi) SEQ ID NOs: 709 and 710, (xxii) SEQ ID NOs: 711 and 712, (xxiii) SEQ ID NOs: 713 and 714, (xxiv) SEQ ID NOs: 715 and 716, (xxv) SEQ ID NOs: 717 and 718, (xxvi) SEQ ID NOs: 719 and 720, (xxvii) SEQ ID NOs: 721 and 722, (xxviii) SEQ ID NOs: 723 and 724, (xxix) SEQ ID NOs: 725 and 726, (xxx) SEQ ID NOs: 727 and 728, (xxxi) SEQ ID NOs: 729 and 730, (xxxii) SEQ ID NOs: 731 and 732, (xxxiii) SEQ ID NOs: 733 and 734, (xxxiv) SEQ ID NOs: 735 and 736, (xxxv) SEQ ID NOs: 737 and 738, (xxxvi) SEQ ID NOs: 739 and 740, (xxxvii) SEQ ID NOs: 741 and 742, (xxxviii) SEQ ID NOs: 743 and 744, (xxxix) SEQ ID NOs: 745 and 746, (xl) SEQ ID NOs: 747 and 748, (xli) SEQ ID NOs: 749 and 750, (xlii) SEQ ID NOs: 751 and 752, (xliii) SEQ ID NOs: 753 and 754, (xliv) SEQ ID NOs: 755 and 756, (xlv) SEQ ID NOs: 757 and 758, (xlvi) SEQ ID NOs: 759 and 760, (xlvii) SEQ ID NOs: 761 and 762, (xlviii) SEQ ID NOs: 763 and 764, (xlix) SEQ ID NOs: 765 and 766, (1) SEQ ID NOs: 767 and 768, (li) SEQ ID NOs: 769 and 770, (lii) SEQ ID NOs: 771 and 772, (liii) SEQ ID NOs: 773 and 774, (liv) SEQ ID NOs: 775 and 776, (lv) SEQ ID NOs: 777 and 778, (lvi) SEQ ID NOs: 779 and 780, (lvii) SEQ ID NOs: 781 and 782, (lviii) SEQ ID NOs: 783 and 784, (lix) SEQ ID NOs: 785 and 786, (lx) SEQ ID NOs: 787 and 788, (lxi) SEQ ID NOs: 789 and 790, (lxii) SEQ ID NOs: 791 and 792, (lxiii) SEQ ID NOs: 793 and 794, (lxiv) SEQ ID NOs: 795 and 800, (lxv) SEQ ID NOs: 795 and 801, (lxvi) SEQ ID NOs: 795 and 802, (lxvii) SEQ ID NOs: 796 and 800, (lxviii) SEQ ID NOs: 796 and 801, (lxix) SEQ ID NOs: 796 and 802, (lxx) SEQ ID NOs: 797 and 800, (lxxi) SEQ ID NOs: 797 and 801, (lxxii) SEQ ID NOs: 797 and 802, (lxxiii) SEQ ID NOs: 798 and 800, (lxxiv) SEQ ID NOs: 798 and 801, (lxxv) SEQ ID NOs: 798 and 802, (lxxvi) SEQ ID NOs: 799 and 800, (lxxvii) SEQ ID NOs: 799 and 801, (lxxviii) SEQ ID NOs: 799 and 802, (lxxix) SEQ ID NOs: 803 and 806, (lxxx) SEQ ID NOs: 803 and 807, (lxxxi) SEQ ID NOs: 803 and 808, (lxxxii) SEQ ID NOs: 804 and 806, (lxxxiii) SEQ ID NOs: 804 and 807, (lxxxix) SEQ ID NOs: 804 and 808, (lxxxv) SEQ ID NOs: 805 and 806, (lxxxvi) SEQ ID NOs: 805 and 807, (lxxxvii) SEQ ID NOs: 805 and 808, (lxxxviii) SEQ ID NOs: 809 and 812, (lxxxix) SEQ ID NOs: 809 and 813, (xc) SEQ ID NOs: 810 and 812, (xci) SEQ ID NOs: 810 and 813, (xcii) SEQ ID NOs: 811 and 812, (xciii) SEQ ID NOs: 811 and 813, (xciv) SEQ ID NOs: 814 and 816, (xcv) SEQ ID NOs: 814 and 817, (xcvi) SEQ ID NOs: 814 and 818, (xcvii) SEQ ID NOs: 815 and 816, (xcviii) SEQ ID NOs: 815 and 817, (xcix) SEQ ID NOs: 815 and 818, (c) SEQ ID NOs: 819 and 824, (ci) SEQ ID NOs: 819 and 825, (cii) SEQ ID NOs: 819 and 826, (ciii) SEQ ID NOs: 819 and 827, (civ) SEQ ID NOs: 819 and 828, (cv) SEQ ID NOs: 820 and 824, (cvi) SEQ ID NOs: 820 and 825, (cvii) SEQ ID NOs: 820 and 826, (cviii) SEQ ID NOs: 820 and 827, (cix) SEQ ID NOs: 820 and 828, (cx) SEQ ID NOs: 821 and 824, (cxi) SEQ ID NOs: 821 and 825, (cxii) SEQ ID NOs: 821 and 826, (cxiii) SEQ ID NOs: 821 and 827, (cxiv) SEQ ID NOs: 821 and 828, (cxv) SEQ ID NOs: 822 and 824, (cxvi) SEQ ID NOs: 822 and 825, (cxvii) SEQ ID NOs: 822 and 826, (cxviii) SEQ ID NOs: 822 and 827, (cxix) SEQ ID NOs: 822 and 828, (cxx) SEQ ID NOs: 823 and 824, (cxxi) SEQ ID NOs: 823 and 825, (cxxii) SEQ ID NOs: 823 and 826, (cxxiii) SEQ ID NOs: 823 and 827, (cxxiv) SEQ ID NOs: 823 and 828, and (cxxv) SEQ ID NOs: 829 and 830, as shown in FIGS. 22A-22R, as well as those disclosed herein (see, e.g., Section (V)(B)(10) above).

[0528] Embodiment (C)(11): In some other further embodiments of an NKp30 NKE antibody comprising means for binding the ECD of a human TTA, the human TTA comprises human CEA. Suitable variable heavy VH and variable light VL domains that bind to the ECD of human CEA include, but are not limited to, VH/VL pairs selected from the group including: (i) SEQ ID NOs: 239 and 240, (ii) SEQ ID NOs: 241 and 242, (iii) SEQ ID NOs: 243 and 244, (iv) SEQ ID NOs: 245 and 246, (v) SEQ ID NOs: 247 and 248, (vi) SEQ ID NOs: 249 and 250, (vii) SEQ ID NOs: 251 and 252, (viii) SEQ ID NOs: 253 and 254, (ix) SEQ ID NOs: 255 and 256, (x) SEQ ID NOs: 257 and 258, (xi) SEQ ID NOs: 259 and 260, (xii) SEQ ID NOs: 261 and 262, (xiii) SEQ ID NOs: 263 and 264, and (xiv) SEQ ID NOs: 265 and 266, as shown in FIGS. 18A-18C, as well as those disclosed herein (see, e.g., Section (V)(B)(11) above).

[0529] Embodiment (C)(12): In some other further embodiments of an NKp30 NKE antibody comprising means for binding the ECD of a human TTA, the human TTA comprises human CLDN18.2. Suitable variable heavy VH and variable light VL domains that bind to the ECD of human CLDN18.2 include, but are not limited to, VH/VL pairs selected from the group including: (i) SEQ ID NOs: 226 and 229, (ii) SEQ ID NOs: 226 and 230, (iii) SEQ ID NOs: 227 and 229, (iv) SEQ ID NOs: 227 and 230, (v) SEQ ID NOs: 228 and 229, (vi) SEQ ID NOs: 228 and 230, and (vii) SEQ ID NOs: 231 and 232, as shown in FIG. 16, as well as those disclosed herein (see, e.g., Section (V)(B)(12) above).

[0530] Embodiment (C)(13): In some other further embodiments of an NKp30 NKE antibody comprising means for binding the ECD of a human TTA, the human TTA comprises human BCMA. Suitable variable heavy VH and variable light VL domains that bind to the ECD of human BCMA include, but are not limited to, VH/VL pairs selected from the group including: (i) SEQ ID NOs: 233 and 234, (ii) SEQ ID NOs: 235 and 236, (iii) SEQ ID NOs: 237 and 238, (iv) SEQ ID NOs: 12 and 16, (v) SEQ ID NOs: 22 and 26, (vi) SEQ ID NOs: 32 and 36, (vii) SEQ ID NOs: 42 and 46, (viii) SEQ ID NOs: 52 and 56, (ix) SEQ ID NOs: 62 and 66, and (x) SEQ ID NOs: 72 and 76, as shown in FIGS. 17A-17C, as well as those disclosed herein (see, e.g., Section (V)(B)(13) above).

[0531] Embodiment (C)(14): In some other further embodiments of an NKp30 NKE antibody comprising means for binding the ECD of a human TTA, the human TTA comprises human DLL3. Suitable variable heavy VH and variable light VL domains that bind to the ECD of human DLL3 include, but are not limited to, VH/VL pairs selected from the group including: (i) SEQ ID NOs: 837 and 838, (ii) SEQ ID NOs: 839 and 840, (iii) SEQ ID NOs: 841 and 842, (iv) SEQ ID NOs: 843 and 844, (v) SEQ ID NOs: 845 and 846, (vi) SEQ ID NOs: 847 and 848, (vii) SEQ ID NOs: 849 and 850, (viii) SEQ ID NOs: 851 and 852, (ix) SEQ ID NOs: 853 and 854, (x) SEQ ID NOs: 855 and 856, (xi) SEQ ID NOs: 857 and 858, (xii) SEQ ID NOs: 859 and 860, (xiii) SEQ ID NOs: 861 and 862, (xiv) SEQ ID NOs: 863 and 864, (xv) SEQ ID NOs: 865 and 866, (xvi) SEQ ID NOs: 867 and 868, and (xvii) SEQ ID NOs: 869 and 870, as shown in FIGS. 24A-24C, as well as those disclosed herein (see, e.g., Section (V)(B)(14) above).

[0532] Embodiment (C)(15): In some other further embodiments of an NKp30 NKE antibody comprising means for binding the ECD of a human TTA, the human TTA comprises human PD-1. Suitable variable heavy VH and variable light VL domains that bind to the ECD of human PD-1 include, but are not limited to, VH/VL pairs selected from the group including: (i) SEQ ID NOs: 871 and 872, (ii) SEQ ID NOs: 873 and 874, (iii) SEQ ID NOs: 875 and 876, (iv) SEQ ID NOs: 877 and 878, (v) SEQ ID NOs: 879 and 880, (vi) SEQ ID NOs: 881 and 882, (vii) SEQ ID NOs: 883 and 884, (viii) SEQ ID NOs: 885 and 886, (ix) SEQ ID NOs: 887 and 888, (x) SEQ ID NOs: 889 and 890, (xi) SEQ ID NOs: 891 and 892, (xii) SEQ ID NOs: 893 and 894, (xiii) SEQ ID NOs: 895 and 896, (xiv) SEQ ID NOs: 897 and 898, (xv) SEQ ID NOs: 899 and 900, (xvi) SEQ ID NOs: 901 and 902, (xvii) SEQ ID NOs: 903 and 904, (xviii) SEQ ID NOs: 905 and 906, (xix) SEQ ID NOs: 907 and 908, and (xx) SEQ ID NOs: 909 and 910, as shown in FIGS. 25A-25G, as well as those disclosed herein (see, e.g., Section (V)(B)(15) above).

[0533] Embodiment (C)(16): In some other further embodiments of an NKp30 NKE antibody comprising means for binding the ECD of a human TTA, the human TTA comprises human ANOL. Suitable variable heavy VH and variable light VL domains that bind to the ECD of human ANO1 include, but are not limited to, the sequences disclosed herein (see, e.g., Section (V)(B)(16) above).

[0534] Embodiment (C)(17): In some other further embodiments of an NKp30 NKE antibody comprising means for binding the ECD of a human TTA, the human TTA comprises human CD22. Suitable variable heavy VH and variable light VL domains that bind to the ECD of human CD22 include, but are not limited to, the sequences disclosed herein (see, e.g., Section (V)(B)(17) above).

[0535] Embodiment (C)(18): In some other further embodiments of an NKp30 NKE antibody comprising means for binding the ECD of a human TTA, the human TTA comprises human CD38. Suitable variable heavy VH and variable light VL domains that bind to the ECD of human CD38 include, but are not limited to, the sequences disclosed herein (see, e.g., Section (V)(B)(18) above).

### VII. Nucleic Acids

[0536] The disclosure further provides nucleic acid compositions encoding the NK cell ABD-containing antibodies provided herein, including, but not limited to, multispecific antibodies and monospecific antibodies.

[0537] As will be appreciated by those in the art, the nucleic acid compositions will depend on the format and scaffold of the heterodimeric protein. Thus, for example, when the format requires three amino acid sequences, such as for the 1+1 Fab-scFv-Fc format (e.g., a first amino acid monomer comprising an Fc domain and a scFv, a second amino acid monomer comprising a heavy chain and a light chain), three nucleic acid sequences can be incorporated into one or more expression vectors for expression. Similarly, some formats (e.g., dual scFv formats such as disclosed in FIG. 8F) only two nucleic acids are needed; again, they can be put into one or two expression vectors.

[0538] As is known in the art, the nucleic acids encoding the components of the antibodies described herein can be incorporated into expression vectors as is known in the art, and depending on the host cells used to produce the heterodimeric antibodies described herein.

[0539] Generally, the nucleic acids are operably linked to any number of regulatory elements (promoters, origin of replication, selectable markers, ribosomal binding sites, inducers, etc.). The expression vectors can be extra-chromosomal or integrating vectors.

[0540] The nucleic acids and/or expression vectors of the antibodies described herein are then transformed into any number of different types of host cells as is well known in the art, including mammalian, bacterial, yeast, insect and/or fungal cells, with mammalian cells (e.g., CHO cells), finding use in many embodiments.

[0541] In some embodiments, nucleic acids encoding each monomer and the optional nucleic acid encoding a light chain, as applicable depending on the format, are each contained within a single expression vector, generally under different or the same promoter controls. In embodiments of particular use in the antibodies described herein, each of these two or three nucleic acids are contained on a different expression vector. As shown herein and in U.S. Pat. No. 9,822,186, hereby incorporated by reference, different vector ratios can be used to drive heterodimer formation. That is, surprisingly, while the proteins comprise first monomer:second monomer:light chains (in the case of many of the embodiments herein that have three polypeptides comprising the heterodimeric antibody) in a 1:1:2 ratio, these are not the ratios that give the best results.

[0542] The heterodimeric antibodies described herein are made by culturing host cells comprising the expression vector(s) as is well known in the art. Once produced, traditional antibody purification steps are done, including an ion exchange chromatography step. As discussed herein, having the pIs of the two monomers differ by at least 0.5 can allow separation by ion exchange chromatography or isoelectric focusing, or other methods sensitive to isoelectric point. That is, the inclusion of pI substitutions that alter the isoelectric point (pI) of each monomer so that such that each monomer has a different pI, and the heterodimer also has a distinct pI, thus facilitating isoelectric purification of the “1+1 Fab-scFv-Fc” and “2+1” heterodimers (e.g., anionic exchange columns, cationic exchange columns). These substitutions also aid in the determination and monitoring of any contaminating dual scFv-Fc and mAb homodimers post-purification (e.g., IEF gels, cIEF, and analytical IEX columns).

[0543] Additionally, as is known in the art, N- and/or C-terminal clipping can occur during protein synthesis, whereby the heavy chains depicted herein may have the C-terminal lysine (K447) removed, as well as the penultimate glycine (G446), and optionally additional amino acids residues (e.g. from 1, 2, 3, 4, 5, 6, 7, 8, 9, 10 or more C-terminal amino acids can be removed). Alternatively, the nucleic acids encoding the heavy chains of the bispecific antibodies can be engineered such that these terminal residues are eliminated entirely to facilitate additional homogeneity.

### VIII. Biological and Biochemical Functionality of the Heterodimeric Bispecific Antibodies

[0544] Generally, the antibodies described herein are administered to patients with cancer, and efficacy is assessed, in a number of ways as described herein. Thus, while standard assays of efficacy can be run, such as cancer load, size of tumor, evaluation of presence or extent of metastasis, etc., immuno-oncology treatments can be assessed on the basis of immune status evaluations as well. This can be done in a number of ways, including both in vitro and in vivo assays.

### IX. Treatments

[0545] Once made, the compositions of the invention find use in a number of oncology applications, by treating cancer, generally by enhancing immune responses, including, activating NK cells, enhancing NK cell mediated lysis of tumor cells and providing co-stimulation to T cells in the tumor environment. Such compositions can be combined with proinflammatory cytokines for increased cytotoxicity against tumor cells.

[0546] A. Antibody Compositions for In Vivo Administration

[0547] Formulations of the antibodies used in accordance with the antibodies described herein are prepared for storage by mixing an antibody having the desired degree of purity with optional pharmaceutically acceptable carriers, excipients, or stabilizers (Remington's Pharmaceutical Sciences 16th edition, Osol, A. Ed. [1980]), in the form of lyophilized formulations or aqueous solutions.

[0548] B. Administration Modalities

[0549] The antibodies provided herein administered to a subject, in accord with known methods, such as intravenous administration as a bolus or by continuous infusion over a period of time.

[0550] C. Treatment Modalities

[0551] In the methods described herein, therapy is used to provide a positive therapeutic response with respect to a disease or condition. By “positive therapeutic response” is intended an improvement in the disease or condition, and/or an improvement in the symptoms associated with the disease or condition. For example, a positive therapeutic response would refer to one or more of the following improvements in the disease: (1) a reduction in the number of neoplastic cells; (2) an increase in neoplastic cell death; (3) inhibition of neoplastic cell survival; (5) inhibition (i.e., slowing to some extent, preferably halting) of tumor growth; (6) an increased patient survival rate; and (7) some relief from one or more symptoms associated with the disease or condition.

[0552] Positive therapeutic responses in any given disease or condition can be determined by standardized response criteria specific to that disease or condition. Tumor response can be assessed for changes in tumor morphology (i.e., overall tumor burden, tumor size, and the like) using screening techniques such as magnetic resonance imaging (MM) scan, x-radiographic imaging, computed tomographic (CT) scan, bone scan imaging, endoscopy, and tumor biopsy sampling including bone marrow aspiration (BMA) and counting of tumor cells in the circulation.

[0553] In addition to these positive therapeutic responses, the subject undergoing therapy may experience the beneficial effect of an improvement in the symptoms associated with the disease.

[0554] Treatment according to the disclosure includes a “therapeutically effective amount” of the medicaments used. A “therapeutically effective amount” refers to an amount effective, at dosages and for periods of time necessary, to achieve a desired therapeutic result.

[0555] A therapeutically effective amount may vary according to factors such as the disease state, age, sex, and weight of the individual, and the ability of the medicaments to elicit a desired response in the individual. A therapeutically effective amount is also one in which any toxic or detrimental effects of the antibody or antibody portion are outweighed by the therapeutically beneficial effects.

[0556] A “therapeutically effective amount” for cancer therapy may also be measured by its ability to stabilize the progression of disease. The ability of a compound to inhibit cancer may be evaluated in an animal model system predictive of efficacy in human tumors.

[0557] Alternatively, this property of a composition may be evaluated by examining the ability of the compound to inhibit cell growth or to induce apoptosis by in vitro assays known to the skilled practitioner. A therapeutically effective amount of a therapeutic compound may decrease tumor size, or otherwise ameliorate symptoms in a subject.

[0558] Dosage regimens are adjusted to provide the optimum desired response (e.g., a therapeutic response). For example, a single bolus may be administered, several divided doses may be administered over time or the dose may be proportionally reduced or increased as indicated by the exigencies of the therapeutic situation. Parenteral compositions may be formulated in dosage unit form for ease of administration and uniformity of dosage. Dosage unit form as used herein refers to physically discrete units suited as unitary dosages for the subjects to be treated; each unit contains a predetermined quantity of active compound calculated to produce the desired therapeutic effect in association with the required pharmaceutical carrier.

[0559] The specification for the dosage unit forms of the disclosure are dictated by and directly dependent on (a) the unique characteristics of the active compound and the particular therapeutic effect to be achieved, and (b) the limitations inherent in the art of compounding such an active compound for the treatment of sensitivity in individuals.

[0560] All cited references are herein expressly incorporated by reference in their entirety.

[0561] Whereas particular embodiments of the disclosure have been described above for purposes of illustration, it will be appreciated by those skilled in the art that numerous variations of the details may be made without departing from the invention as described in the appended claims.

The application's sequence listing, which the Patent Office published only in electronic form, follows.

SEQUENCE LISTING (2006 sequences)

SEQ ID NO: 1 - protein, 15 aa, synthetic construct
GGGGSGGGGSGGGGS

SEQ ID NO: 2 - protein, 18 aa, synthetic construct
GSTSGSGKPGSGEGSTKG

SEQ ID NO: 3 - protein, 14 aa, synthetic construct
IRPRAIGGSKPRVA

SEQ ID NO: 4 - protein, 15 aa, synthetic construct
GKGGSGKGGSGKGGS

SEQ ID NO: 5 - protein, 15 aa, synthetic construct
GGKGSGGKGSGGKGS

SEQ ID NO: 6 - protein, 15 aa, synthetic construct
GGGKSGGGKSGGGKS

SEQ ID NO: 7 - protein, 15 aa, synthetic construct
GKGKSGKGKSGKGKS

SEQ ID NO: 8 - protein, 15 aa, synthetic construct
GGGKSGGKGSGKGGS

SEQ ID NO: 9 - protein, 15 aa, synthetic construct
GKPGSGKPGSGKPGS

SEQ ID NO: 10 - protein, 20 aa, synthetic construct
GKPGSGKPGSGKPGSGKPGS

SEQ ID NO: 11 - protein, 20 aa, synthetic construct
GKGKSGKGKSGKGKSGKGKS

SEQ ID NO: 12 - protein, 120 aa, synthetic construct
  source 1..120: note = S1R4_10corr[BCMA]_H1_vh
EVQLLESGGGLVQPGGSLRLSCAASGFTFSSYAMSWVRQAPGKGLEWVSAISGSGGSTYYADSVKGRFTISRDNSKNTLYLQMNSLRAEDTAVYYCAKRQWSSSWYFDYWGQGTLVTVSS

SEQ ID NO: 13 - protein, 5 aa, synthetic construct
  source 1..5: note = S1R4_10corr[BCMA]_H1_vhCDR1
SYAMS

SEQ ID NO: 14 - protein, 17 aa, synthetic construct
  source 1..17: note = S1R4_10corr[BCMA]_H1_vhCDR2
AISGSGGSTYYADSVKG

SEQ ID NO: 15 - protein, 11 aa, synthetic construct
  source 1..11: note = S1R4_10corr[BCMA]_H1_vhCDR3
RQWSSSWYFDY

SEQ ID NO: 16 - protein, 107 aa, synthetic construct
  source 1..107: note = S1R4_10corr[BCMA]_L1_vl
DIQMTQSPSSLSASVGDRVTITCRASQSISSYLNWYQQKPGKAPKLLIYAASSLQSGVPSRFSGSGSGTDFTLTISSLQPEDFATYYCQQSYSTPPTFGQGTKLEIK

SEQ ID NO: 17 - protein, 11 aa, synthetic construct
  source 1..11: note = S1R4_10corr[BCMA]_L1_vlCDR1
RASQSISSYLN

SEQ ID NO: 18 - protein, 7 aa, synthetic construct
  source 1..7: note = S1R4_10corr[BCMA]_L1_vlCDR2
AASSLQS

SEQ ID NO: 19 - protein, 9 aa, synthetic construct
  source 1..9: note = S1R4_10corr[BCMA]_L1_vlCDR3
QQSYSTPPT

SEQ ID NO: 20 - protein, 15 aa, synthetic construct
GGGGSGGGGSGGGGS

SEQ ID NO: 21 - protein, 20 aa, synthetic construct
GGGGSGGGGSGGGGSGGGGS

SEQ ID NO: 22 - protein, 120 aa, synthetic construct
  source 1..120: note = S1R5_125[BCMA]_H1_vh
EVQLLESGGGLVQPGGSLRLSCAASGFTFSSYAMSWVRQAPGKGLEWVSAISGSGDSTFYADSVKGRFTISRDNSKNTLYLQMNSLRAEDTAVYYCAKRRWGRTWYFDYWGQGTLVTVSS

SEQ ID NO: 23 - protein, 5 aa, synthetic construct
  source 1..5: note = S1R5_125[BCMA]_H1_vhCDR1
SYAMS

SEQ ID NO: 24 - protein, 17 aa, synthetic construct
  source 1..17: note = S1R5_125[BCMA]_H1_vhCDR2
AISGSGDSTFYADSVKG

SEQ ID NO: 25 - protein, 11 aa, synthetic construct
  source 1..11: note = S1R5_125[BCMA]_H1_vhCDR3
RRWGRTWYFDY

SEQ ID NO: 26 - protein, 107 aa, synthetic construct; identical to SEQ ID NO: 16
  source 1..107: note = S1R5_125[BCMA]_L1_vl

SEQ ID NO: 27 - protein, 11 aa, synthetic construct
  source 1..11: note = S1R5_125[BCMA]_L1_vlCDR1
RASQSISSYLN

SEQ ID NO: 28 - protein, 7 aa, synthetic construct
  source 1..7: note = S1R5_125[BCMA]_L1_vlCDR2
AASSLQS

SEQ ID NO: 29 - protein, 9 aa, synthetic construct
  source 1..9: note = S1R5_125[BCMA]_L1_vlCDR3
QQSYSTPPT

SEQ ID NO: 30 - protein, 20 aa, synthetic construct
GGGGSGGGGSGGGGSGGGGS

SEQ ID NO: 31 - protein, 25 aa, synthetic construct
GGGGSGGGGSGGGGSGGGGSGGGGS

SEQ ID NO: 32 - protein, 121 aa, synthetic construct
  source 1..121: note = 1A1[BCMA]_H1_vh
EVQLLESGGGLVQPGGSLRLSCAASGFTFSNYDMAWVRQAPGKGLEWVSSISRSGDSTLYRDSVKGRFTISRDNSKSTLYLQMNSLRAEDTAVYYCASQNYGGFGDWFAWWGQGTLVTVSS

SEQ ID NO: 33 - protein, 5 aa, synthetic construct
  source 1..5: note = 1A1[BCMA]_H1_vhCDR1
NYDMA

SEQ ID NO: 34 - protein, 17 aa, synthetic construct
  source 1..17: note = 1A1[BCMA]_H1_vhCDR2
SISRSGDSTLYRDSVKG

SEQ ID NO: 35 - protein, 12 aa, synthetic construct
  source 1..12: note = 1A1[BCMA]_H1_vhCDR3
QNYGGFGDWFAW

SEQ ID NO: 36 - protein, 107 aa, synthetic construct
  source 1..107: note = 1A1[BCMA]_L1_vl
DTVLTQSPSSLSASVGDRVTITCRASEGVSTLMHWYQQKPGKQPKLLIYLASHLESGVPARFSGSGSGTDFTLTISSLQPEDFATYYCQQSWNDPRTFGGGTKVEIK

SEQ ID NO: 37 - protein, 11 aa, synthetic construct
  source 1..11: note = 1A1[BCMA]_L1_vlCDR1
RASEGVSTLMH

SEQ ID NO: 38 - protein, 7 aa, synthetic construct
  source 1..7: note = 1A1[BCMA]_L1_vlCDR2
LASHLES

SEQ ID NO: 39 - protein, 9 aa, synthetic construct
  source 1..9: note = 1A1[BCMA]_L1_vlCDR3
QQSWNDPRT

SEQ ID NO: 40 - protein, 35 aa, synthetic construct
GGGGAGGGGAGGGGAGGGGAGGGGAGGGGAGGGGA

SEQ ID NO: 41 - protein, 30 aa, synthetic construct
DPALVHQRPAPPGGGGSGGGGSGGGGSGGG

SEQ ID NO: 42 - protein, 121 aa, synthetic construct
  source 1..121: note = 1B4[BCMA]_H1.1_vh
EVQLLESGGGLVQPGGSLRLSCAASGFIFSNYDMAWVRQAPGKGLEWVSSISRSGGSTSYRDSVKGRFTISRDNSKSTLYLQMNSLRAEDTAVYYCARLDYGYNYAWIAYWGQGTLVTVSS

SEQ ID NO: 43 - protein, 5 aa, synthetic construct
  source 1..5: note = 1B4[BCMA]_H1.1_vhCDR1
NYDMA

SEQ ID NO: 44 - protein, 17 aa, synthetic construct
  source 1..17: note = 1B4[BCMA]_H1.1_vhCDR2
SISRSGGSTSYRDSVKG

SEQ ID NO: 45 - protein, 12 aa, synthetic construct
  source 1..12: note = 1B4[BCMA]_H1.1_vhCDR3
LDYGYNYAWIAY

SEQ ID NO: 46 - protein, 107 aa, synthetic construct
  source 1..107: note = 1B4[BCMA]_L1_vl
DIQMTQSPSSLSASVGDRVTITCRASEGISNDLAWYQQKPGKSPKLLIYAASRLQDGVPSRFSGSGSGTDYTLTISSLQPEDFATYFCQQSYKYPFTFGSGTKLEIK

SEQ ID NO: 47 - protein, 11 aa, synthetic construct
  source 1..11: note = 1B4[BCMA]_L1_vlCDR1
RASEGISNDLA

SEQ ID NO: 48 - protein, 7 aa, synthetic construct
  source 1..7: note = 1B4[BCMA]_L1_vlCDR2
AASRLQD

SEQ ID NO: 49 - protein, 9 aa, synthetic construct
  source 1..9: note = 1B4[BCMA]_L1_vlCDR3
QQSYKYPFT

SEQ ID NO: 50 - protein, 19 aa, synthetic construct
GKPGSGKPGSKTHTCPPCP

SEQ ID NO: 51 - protein, 14 aa, synthetic construct
GKPGSKTHTCPPCP

SEQ ID NO: 52 - protein, 121 aa, synthetic construct
  source 1..121: note = 1B3[BCMA]_H1_vh
EVQLLESGGGLVQPGGSLRLSCAASGFTFSNYDMAWVRQAPGKGLEWVSSISTSGDITYYRDSVKGRFTISRDNSKSTLYLQMNSLRAEDTAVYYCARQGYYDGSYLFDYWGQGTLVTVSS

SEQ ID NO: 53 - protein, 5 aa, synthetic construct
  source 1..5: note = 1B3[BCMA]_H1_vhCDR1
NYDMA

SEQ ID NO: 54 - protein, 17 aa, synthetic construct
  source 1..17: note = 1B3[BCMA]_H1_vhCDR2
SISTSGDITYYRDSVKG

SEQ ID NO: 55 - protein, 12 aa, synthetic construct
  source 1..12: note = 1B3[BCMA]_H1_vhCDR3
QGYYDGSYLFDY

SEQ ID NO: 56 - protein, 107 aa, synthetic construct
  source 1..107: note = 1B3[BCMA]_L1_vl
DIQMTQSPSSLSASVGDRVTITCRASQGISNNLNWYQQKPGKTIKPLIYYTSNLQSGVPSRFSGSRSGTDYTLTISSLQPEDFATYYCQQVASFPYTFGAGTKLEIK

SEQ ID NO: 57 - protein, 11 aa, synthetic construct
  source 1..11: note = 1B3[BCMA]_L1_vlCDR1
RASQGISNNLN

SEQ ID NO: 58 - protein, 7 aa, synthetic construct
  source 1..7: note = 1B3[BCMA]_L1_vlCDR2
YTSNLQS

SEQ ID NO: 59 - protein, 9 aa, synthetic construct
  source 1..9: note = 1B3[BCMA]_L1_vlCDR3
QQVASFPYT

SEQ ID NO: 60-61 - skipped (2 entries)

SEQ ID NO: 62 - protein, 121 aa, synthetic construct
  source 1..121: note = 5F2[BCMA]_H1_vh
EVQLLESGGGLVQPGGSLRLSCAASGFTFSNYDMAWVRQAPGKGLEWVSSISTSGDTTSYRDSVKGRFTISRDNSKSTLYLQMNSLRAEDTAVYYCARQDSSYMGDWFAYWGQGTLVTVSS

SEQ ID NO: 63 - protein, 5 aa, synthetic construct
  source 1..5: note = 5F2[BCMA]_H1_vhCDR1
NYDMA

SEQ ID NO: 64 - protein, 17 aa, synthetic construct
  source 1..17: note = 5F2[BCMA]_H1_vhCDR2
SISTSGDTTSYRDSVKG

SEQ ID NO: 65 - protein, 12 aa, synthetic construct
  source 1..12: note = 5F2[BCMA]_H1_vhCDR3
QDSSYMGDWFAY

SEQ ID NO: 66 - protein, 107 aa, synthetic construct
  source 1..107: note = 5F2[BCMA]_L1_vl
DIVMTQSPLSLPVTPGEPASISCRASQNVGSNVDWFLQKPGQSPQLLIYTASNRYTGVPDRFTGSGSGTDFTLKISRVEAEDVGVYYCMQSNSYPLTFGSGTKLEIK

SEQ ID NO: 67 - protein, 11 aa, synthetic construct
  source 1..11: note = 5F2[BCMA]_L1_vlCDR1
RASQNVGSNVD

SEQ ID NO: 68 - protein, 7 aa, synthetic construct
  source 1..7: note = 5F2[BCMA]_L1_vlCDR2
TASNRYT

SEQ ID NO: 69 - protein, 9 aa, synthetic construct
  source 1..9: note = 5F2[BCMA]_L1_vlCDR3
MQSNSYPLT

SEQ ID NO: 70-71 - skipped (2 entries)

SEQ ID NO: 72 - protein, 122 aa, synthetic construct
  source 1..122: note = 6E3[BCMA]_H1_vh
EVQLLESGGGLVQPGGSLRLSCAASGFIFSNYDMAWVRQAPGKGLEWVSSISTSGDITNYRDSVKGRFTISRDNSKITLYLQMNSLRAEDTAVYFCARQAYYGYNAGVMDVWGQGTTVTVSS

SEQ ID NO: 73 - protein, 5 aa, synthetic construct
  source 1..5: note = 6E3[BCMA]_H1_vhCDR1
NYDMA

SEQ ID NO: 74 - protein, 17 aa, synthetic construct
  source 1..17: note = 6E3[BCMA]_H1_vhCDR2
SISTSGDITNYRDSVKG

SEQ ID NO: 75 - protein, 13 aa, synthetic construct
  source 1..13: note = 6E3[BCMA]_H1_vhCDR3
QAYYGYNAGVMDV

SEQ ID NO: 76 - protein, 107 aa, synthetic construct
  source 1..107: note = 6E3[BCMA]_L1_vl
DVQMTQSPSSLSASVGDRVTITCRASKSISKYLAWYQQKPGKANKLLIYSGSTLQSGTPSRFSGSGSGTDFTLTISSLQPEDFATYYCQQYNEYPFTFGSGTKLEIK

SEQ ID NO: 77 - protein, 11 aa, synthetic construct
  source 1..11: note = 6E3[BCMA]_L1_vlCDR1
RASKSISKYLA

SEQ ID NO: 78 - protein, 7 aa, synthetic construct
  source 1..7: note = 6E3[BCMA]_L1_vlCDR2
SGSTLQS

SEQ ID NO: 79 - protein, 9 aa, synthetic construct
  source 1..9: note = 6E3[BCMA]_L1_vlCDR3
QQYNEYPFT

SEQ ID NO: 80 - protein, 216 aa, synthetic construct
  source 1..216: note = I332E : S239D_ADCC-enhanced Heterodimeric Backbone 15 w/ Xtend monomer 2 (+)
APELLGGPDVFLFPPKPKDTLMISRTPEVTCVVVDVSHEDPEVKFNWYVDGVEVHNAKTKPREEQYNSTYRVVSVLTVLHQDWLNGKEYKCKVSNKALPAPIEKTISKAKGQPREPQVYTLPPSREQMTKNQVKLTCLVKGFYPSDIAVEWESNGQPENNYKTTPPVLDSDGSFFLYSKLTVDKSRWQQGNVFSCSVLHEALHSHYTQKSLSLSPG

SEQ ID NO: 81 - protein, 20 aa, synthetic construct
GGGGSGGGGSGGGGSGGGGS

SEQ ID NO: 82 - protein, 14 aa, synthetic construct
STAGDTHLGGEDFD

SEQ ID NO: 83 - protein, 15 aa, synthetic construct
GEGGSGEGGSGEGGS

SEQ ID NO: 84 - protein, 15 aa, synthetic construct
GGEGSGGEGSGGEGS

SEQ ID NO: 85 - protein, 15 aa, synthetic construct
GGGESGGGESGGGES

SEQ ID NO: 86 - protein, 15 aa, synthetic construct
GEGESGEGESGEGES

SEQ ID NO: 87 - protein, 15 aa, synthetic construct
GGGESGGEGSGEGGS

SEQ ID NO: 88 - protein, 20 aa, synthetic construct
GEGESGEGESGEGESGEGES

SEQ ID NO: 89 - protein, 18 aa, synthetic construct
GSTSGSGKPGSGEGSTKG

SEQ ID NO: 90 - protein, 19 aa, synthetic construct
PRGASKSGSASQTGSAPGS

SEQ ID NO: 91 - protein, 19 aa, synthetic construct
GTAAAGAGAAGGAAAGAAG

SEQ ID NO: 92 - protein, 19 aa, synthetic construct
GTSGSSGSGSGGSGSGGGG

SEQ ID NO: 93 - protein, 216 aa, synthetic construct
  source 1..216: note = S239D : I332E_ADCC-enhanced Heterodimeric Backbone 14 w/ Xtend monomer 2 (+)
APELLGGPSVFLFPPKPKDTLMISRTPEVTCVVVDVSHEDPEVKFNWYVDGVEVHNAKTKPREEQYNSTYRVVSVLTVLHQDWLNGKEYKCKVSNKALPAPEEKTISKAKGQPREPQVYTLPPSREQMTKNQVKLTCLVKGFYPSDIAVEWESNGQPENNYKTTPPVLDSDGSFFLYSKLTVDKSRWQQGNVFSCSVLHEALHSHYTQKSLSLSPG

SEQ ID NO: 94 - protein, 5 aa, synthetic construct
GGGGS

SEQ ID NO: 95 - protein, 10 aa, synthetic construct
GGGGSGGGGS

SEQ ID NO: 96 - protein, 15 aa, synthetic construct
GGGGSGGGGSGGGGS

SEQ ID NO: 97 - protein, 30 aa, synthetic construct
GGGGSGGGGSGGGGSGGGGSGGGGSGGGGS

SEQ ID NO: 98 - protein, 35 aa, synthetic construct
GGGGSGGGGSGGGGSGGGGSGGGGSGGGGSGGGGS

SEQ ID NO: 99 - protein, 5 aa, synthetic construct
GGGGA

SEQ ID NO: 100 - protein, 10 aa, synthetic construct
GGGGAGGGGA

SEQ ID NO: 101 - protein, 15 aa, synthetic construct
GGGGAGGGGAGGGGA

SEQ ID NO: 102 - protein, 20 aa, synthetic construct
GGGGAGGGGAGGGGAGGGGA

SEQ ID NO: 103 - protein, 25 aa, synthetic construct
GGGGAGGGGAGGGGAGGGGAGGGGA

SEQ ID NO: 104 - protein, 30 aa, synthetic construct
GGGGAGGGGAGGGGAGGGGAGGGGAGGGGA

SEQ ID NO: 105 - protein, 5 aa, synthetic construct
GKPGS

SEQ ID NO: 106 - protein, 25 aa, synthetic construct
GKPGSGKPGSGKPGSGKPGSGKPGS

SEQ ID NO: 107 - protein, 30 aa, synthetic construct
GKPGSGKPGSGKPGSGKPGSGKPGSGKPGS

SEQ ID NO: 108 - protein, 5 aa, synthetic construct
GGGES

SEQ ID NO: 109 - protein, 15 aa, synthetic construct
EPKSCDKTHTCPPCP

SEQ ID NO: 110 - protein, 9 aa, synthetic construct
KTHTCPPCP

SEQ ID NO: 111 - protein, 15 aa, synthetic construct
EPKSSDKTHTCPPCP

SEQ ID NO: 112 - protein, 19 aa, synthetic construct
GGGGSGGGGSKTHTCPPCP

SEQ ID NO: 113 - protein, 5 aa, synthetic construct
EPKSC

SEQ ID NO: 114 - protein, 15 aa, synthetic construct
EPKSCGGGGSGGGGS

SEQ ID NO: 115 - protein, 15 aa, synthetic construct
EPKSCGKPGSGKPGS

SEQ ID NO: 116 - protein, 10 aa, synthetic construct
EPKSCGKPGS

SEQ ID NO: 117 - protein, 50 aa, synthetic construct
  VARIANT 1..50: note = This sequence may encompass 1-10 GSGGS repeating units
GSGGSGSGGSGSGGSGSGGSGSGGSGSGGSGSGGSGSGGSGSGGSGSGGS

SEQ ID NO: 118 - protein, 50 aa, synthetic construct
  VARIANT 1..50: note = This sequence may encompass 1-10 GGGGS repeating units
GGGGSGGGGSGGGGSGGGGSGGGGSGGGGSGGGGSGGGGSGGGGSGGGGS

SEQ ID NO: 119 - protein, 40 aa, synthetic construct
  VARIANT 1..40: note = This sequence may encompass 1-10 GGGS repeating units
GGGSGGGSGGGSGGGSGGGSGGGSGGGSGGGSGGGSGGGS

SEQ ID NO: 120 - protein, 20 aa, synthetic construct
  VARIANT 1..20: note = This sequence may encompass 1-10 GS repeating units
GSGSGSGSGSGSGSGSGSGS

SEQ ID NO: 121 - protein, 413 aa, synthetic construct
  source 1..413: note = XENP25379 His-Avi_Fc-Tev-human NKG2D (N80-V216) human NKG2D antigen, used for phage panning
HHHHHHGGGGSGLNDIFEAQKIEWHEGGSEPKSSDKTHTCPPCPAPELLGGPSVFLFPPKPKDTLMISRTPEVTCVVVDVSHEDPEVKFNWYVDGVEVHNAKTKPREEQYNSTYRVVSVLTVLHQDWLNGKEYKCKVSNKALPAPIEKTISKAKGQPREPQVYTLPPSREEMTKNQVSLTCLVKGFYPSDIAVEWESNGQPENNYKTTPPVLDSDGSFFLYSKLTVDKSRWQQGNVFSCSVMHEALHNHYTQKSLSLSPGKGGSENLYFQGGGGGSNSLFNQEVQIPLTESYCGPCPKNWICYKNNCYQFFDESKNWYESQASCMSQNASLLKVYSKEDQDLLKLVKSYHWMGLVHIPTNGSWQWEDGSILSPNLLTIIEMQKGDCALYASSFKGYIENCSTPNTYICMQRTV

SEQ ID NO: 122 - protein, 413 aa, synthetic construct
  source 1..413: note = XENP25380 His-Avi_Fc-Tev-cyno NKG2D (N80-V216) cynomolgus NKG2D antigen, used for phage panning
HHHHHHGGGGSGLNDIFEAQKIEWHEGGSEPKSSDKTHTCPPCPAPELLGGPSVFLFPPKPKDTLMISRTPEVTCVVVDVSHEDPEVKFNWYVDGVEVHNAKTKPREEQYNSTYRVVSVLTVLHQDWLNGKEYKCKVSNKALPAPIEKTISKAKGQPREPQVYTLPPSREEMTKNQVSLTCLVKGFYPSDIAVEWESNGQPENNYKTTPPVLDSDGSFFLYSKLTVDKSRWQQGNVFSCSVMHEALHNHYTQKSLSLSPGKGGSENLYFQGGGGGSNSLFNQEVQIPLTESYCGPCPKNWICYKNNCYQFFNESKNWYESQASCMSQNASLLKVYSKEDQDLLKLVKSYHWMGLVHIPTNGSWQWEDGSILSPNLLTIIEMQKGDCALYASSFKGYIENCSIPNTYICMQRTV

SEQ ID NO: 123 - protein, 420 aa, synthetic construct
  source 1..420: note = XENP23311_His-Avi_Fc_IgG1_C220S-TEV-human NKG2D protein, used for Octet binding experiments
HHHHHHGGGGSGLNDIFEAQKIEWHEGGSEPKSSDKTHTCPPCPAPELLGGPSVFLFPPKPKDTLMISRTPEVTCVVVDVSHEDPEVKFNWYVDGVEVHNAKTKPREEQYNSTYRVVSVLTVLHQDWLNGKEYKCKVSNKALPAPIEKTISKAKGQPREPQVYTLPPSREEMTKNQVSLTCLVKGFYPSDIAVEWESNGQPENNYKTTPPVLDSDGSFFLYSKLTVDKSRWQQGNVFSCSVMHEALHNHYTQKSLSLSPGKGGSENLYFQGGGGGSIWSAVFLNSLFNQEVQIPLTESYCGPCPKNWICYKNNCYQFFDESKNWYESQASCMSQNASLLKVYSKEDQDLLKLVKSYHWMGLVHIPTNGSWQWEDGSILSPNLLTIIEMQKGDCALYASSFKGYIENCSTPNTYICMQRTV

SEQ ID NO: 124 - protein, 420 aa, synthetic construct
  source 1..420: note = XENP23309_His-Avi_Fc_IgG1_C220S-TEV-cyno NKG2D protein, used for Octet binding experiments
HHHHHHGGGGSGLNDIFEAQKIEWHEGGSEPKSSDKTHTCPPCPAPELLGGPSVFLFPPKPKDTLMISRTPEVTCVVVDVSHEDPEVKFNWYVDGVEVHNAKTKPREEQYNSTYRVVSVLTVLHQDWLNGKEYKCKVSNKALPAPIEKTISKAKGQPREPQVYTLPPSREEMTKNQVSLTCLVKGFYPSDIAVEWESNGQPENNYKTTPPVLDSDGSFFLYSKLTVDKSRWQQGNVFSCSVMHEALHNHYTQKSLSLSPGKGGSENLYFQGGGGGSIWSAVFLNSLFNQEVQIPLTESYCGPCPKNWICYKNNCYQFFNESKNWYESQASCMSQNASLLKVYSKEDQDLLKLVKSYHWMGLVHIPTNGSWQWEDGSILSPNLLTIIEMQKGDCALYASSFKGYIENCSIPNTYICMQRTV

SEQ ID NO: 125 - protein, 534 aa, Homo sapiens
  source 1..534: note = Human B7H3 sequence
MLRRRGSPGMGVHVGAALGALWFCLTGALEVQVPEDPVVALVGTDATLCCSFSPEPGFSLAQLNLIWQLTDTKQLVHSFAEGQDQGSAYANRTALFPDLLAQGNASLRLQRVRVADEGSFTCFVSIRDFGSAAVSLQVAAPYSKPSMTLEPNKDLRPGDTVTITCSSYQGYPEAEVFWQDGQGVPLTGNVTTSQMANEQGLFDVHSILRVVLGANGTYSCLVRNPVLQQDAHSSVTITPQRSPTGAVEVQVPEDPVVALVGTDATLRCSFSPEPGFSLAQLNLIWQLTDTKQLVHSFTEGRDQGSAYANRTALFPDLLAQGNASLRLQRVRVADEGSFTCFVSIRDFGSAAVSLQVAAPYSKPSMTLEPNKDLRPGDTVTITCSSYRGYPEAEVFWQDGQGVPLTGNVTTSQMANEQGLFDVHSVLRVVLGANGTYSCLVRNPVLQQDAHGSVTITGQPMTFPPEALWVTVGLSVCLIALLVALAFVCWRKIKQSCEEENAGAEDQDGEGEGSKTALQPLKHSDSKEDDGQEIA

SEQ ID NO: 126 - protein, 439 aa, Homo sapiens
  source 1..439: note = Human B7H3, extracellular domain
LEVQVPEDPVVALVGTDATSLCCSFSPEPGFSLAQLNLIWQLTDTKQLVHSFAEGQDQGSAYANRTALFPDLLAQGNASLRLQRVRVADEGSFTCFVSIRDFGSAAVSLQVAAPYSKPSMTLEPNKDLRPGDTVTITCSSYQGYPEAEVFWQDGQGVPLTGNVTTSQMANEQGLFDVHSILRVVLGANGTYSCLVRNPVLQQDAHSSVTITPQRSPTGAVEVQVPEDPVVALVGTDATLRCSFSPEPGFSLAQLNLIWQLTDTKQLVHSFTEGRDQGSAYANRTALFPDLLAQGNASLRLQRVRVADEGSFTCFVSIRDFGSAAVSLQVAAPYSKPSMTLEPNKDLRPGDTVTITCSSYRGYPEAEVFWQDGQGVPLTGNVTTSQMANEQGLFDVHSVLRVVLGANGTYSCLVRNPVLQQDAHGSVTITGQPMTFPPEA

SEQ ID NO: 127 - protein, 111 aa, Homo sapiens
  source 1..111: note = Human B7H3, V1C1 domain
LEVQVPEDPVVALVGTDATLCCSFSPEPGFSLAQLNLIWQLTDTKQLVHSFAEGQDQGSAYANRTALFPDLLAQGNASLRLQRVRVADEGSFTCFVSIRDFGSAAVSLQVA

SEQ ID NO: 128 - protein, 214 aa, Homo sapiens
  source 1..214: note = Human B7H3, V2C2 domain
PTGAVEVQVPEDPVVALVGTDATLRCSFSPEPGFSLAQLNLIWQLTDTKQLVHSFTEGRDQGSAYANRTALFPDLLAQGNASLRLQRVRVADEGSFTCFVSIRDFGSAAVSLQVAAPYSKPSMTLEPNKDLRPGDTVTITCSSYRGYPEAEVFWQDGQGVPLTGNVTTSQMANEQGLFDVHSVLRVVLGANGTYSCLVRNPVLQQDAHGSVTIT

SEQ ID NO: 129 - protein, 316 aa, Mus musculus
  source 1..316: note = Mouse B7H3 sequence
MLRGWGGPSVGVCVRTALGVLCLCLTGAVEVQVSEDPVVALVDTDATLRCSFSPEPGFSLAQLNLIWQLTDTKQLVHSFTEGRDQGSAYSNRTALFPDLLVQGNASLRLQRVRVTDEGSYTCFVSIQDFDSAAVSLQVAAPYSKPSMTLEPNKDLRPGNMVTITCSSYQGYPEAEVFWKDGQGVPLTGNVTTSQMANERGLFDVHSVLRVVLGANGTYSCLVRNPVLQQDAHGSVTITGQPLTFPPEALWVTVGLSVCLVVLLVALAFVCWRKIKQSCEEENAGAEDQDGDGEGSKTALRPLKPSENKEDDGQEIA

SEQ ID NO: 130 - protein, 220 aa, Mus musculus
  source 1..220: note = Mouse B7H3, extracellular domain
VEVQVSEDPVVALVDTDATLRCSFSPEPGFSLAQLNLIWQLTDTKQLVHSFTEGRDQGSAYSNRTALFPDLLVQGNASLRLQRVRVTDEGSYTCFVSIQDFDSAAVSLQVAAPYSKPSMTLEPNKDLRPGNMVTITCSSYQGYPEAEVFWKDGQGVPLTGNVTTSQMANERGLFDVHSVLRVVLGANGTYSCLVRNPVLQQDAHGSVTITGQPLTFPPEA

SEQ ID NO: 131 - protein, 584 aa, Macaca fascicularis
  source 1..584: note = Cynomolgus B7H3 sequence (predicted)
MKLSSDHVFPLFRKLQWLPAAFRIQFTPVSPSAGAAFHHGEPSCQLPHSKMLHRRGSPGMGVHVGAALGALWFCLTGALEVQVPEDPVVALVGTDATLRCSFSPEPGFSLAQLNLIWQLTDTKQLVHSFTEGRDQGSAYANRTALFLDLLAQGNASLRLQRVRVADEGSFTCFVSIRDFGSAAVSLQVAAPYSKPSMTLEPNKDLRPGDTVTITCSSYRGYPEAEVFWQDGQGAPLTGNVTTSQMANEQGLFDVHSVLRVVLGANGTYSCLVRNPVLQQDAHGSITITPQRSPTGAVEVQVPEDPVVALVGTDATLRCSFSPEPGFSLAQLNLIWQLTDTKQLVHSFTEGRDQGSAYANRTALFLDLLAQGNASLRLQRVRVADEGSFTCFVSIRDFGSAAVSLQVAAPYSKPSMTLEPNKDLRPGDTVTITCSSYRGYPEAEVFWQDGQGAPLTGNVTTSQMANEQGLFDVHSVLRVVLGANGTYSCLVRNPVLQQDAHGSVTITGQPMTFPPEALWVTVGLSVCLVALLVALAFVCWRKIKQSCEEENAGAEDQDGEGEGSKTALQPLKHSDSKEDDGQELA

SEQ ID NO: 132 - protein, 438 aa, Macaca fascicularis
  source 1..438: note = Cynomolgus B7H3, extracellular domain
LEVQVPEDPVVALVGTDATLRCSFSPEPGFSLAQLNLIWQLTDTKQLVHSFTEGRDQGSAYANRTALFLDLLAQGNASLRLQRVRVADEGSFTCFVSIRDFGSAAVSLQVAAPYSKPSMTLEPNKDLRPGDTVTITCSSYRGYPEAEVFWQDGQGAPLTGNVTTSQMANEQGLFDVHSVLRVVLGANGTYSCLVRNPVLQQDAHGSITITPQRSPTGAVEVQVPEDPVVALVGTDATLRCSFSPEPGFSLAQLNLIWQLTDTKQLVHSFTEGRDQGSAYANRTALFLDLLAQGNASLRLQRVRVADEGSFTCFVSIRDFGSAAVSLQVAAPYSKPSMTLEPNKDLRPGDTVTITCSSYRGYPEAEVFWQDGQGAPLTGNVTTSQMANEQGLFDVHSVLRVVLGANGTYSCLVRNPVLQQDAHGSVTITGQPMTFPPEA

SEQ ID NO: 133 - protein, 120 aa, synthetic construct
  source 1..120: note = Nkp46-1_VH
QVQLQQSGPELVKPGASVKMSCKASGYTFTDYVINWGKQRSGQGLEWIGEIYPGSGTNYYNEKFKAKATLTADKSSNIAYMQLSSLTSEDSAVYFCARRGRYGLYAMDYWGQGTSVTVSS

SEQ ID NO: 134 - protein, 107 aa, synthetic construct
  source 1..107: note = Nkp46-1_VL
DIQMTQTTSSLSASLGDRVTISCRASQDISNYLNWYQQKPDGTVKLLIYYTSRLHSGVPSRFSGSGSGTDYSLTINNLEQEDIATYFCQQGNTRPWTFGGGTKLEIK

SEQ ID NO: 135 - protein, 122 aa, synthetic construct
  source 1..122: note = Nkp46-2_VH
EVQLQESGPGLVKPSQSLSLTCTVTGYSITSDYAWNWIRQFPGNKLEWMGYITYSGSTSYNPSLESRISITRDTSTNQFFLQLNSVTTEDTATYYCARGGYYGSSWGVFAYWGQGTLVTVSA

SEQ ID NO: 136 - protein, 107 aa, synthetic construct
  source 1..107: note = Nkp46-2_VL
DIQMTQSPASLSASVGETVTITCRVSENIYSYLAWYQQKQGKSPQLLVYNAKTLAEGVPSRFSGSGSGTQFSLKINSLQPEDFGSYYCQHHYGTPWTFGGGTKLEIK

SEQ ID NO: 137 - protein, 116 aa, synthetic construct
  source 1..116: note = Nkp46-3_VH
EVQLQQSGPELVKPGASVKISCKTSGYTFTEYTMHWVKQSHGKSLEWIGGISPNIGGTSYNQKFKGKATLTVDKSSSTAYMELRSLTSEDSAVYYCARRGGSFDYWGQGTTLTVSS

SEQ ID NO: 138 - protein, 107 aa, synthetic construct
  source 1..107: note = Nkp46-3_VL
DIVMTQSPATLSVTPGDRVSLSCRASQSISDYLHWYQQKSHESPRLLIKYASQSISGIPSRFSGSGSGSDFTLSINSVEPEDVGVYYCQNGHSFPLTFGAGTKLELK

SEQ ID NO: 139 - protein, 117 aa, synthetic construct
  source 1..117: note = Nkp46-4_VH
QVQLQQSAVELARPGASVKMSCKASGYTFTSFTMHWVKQRPGQGLEWIGYINPSSGYTEYNQKFKDKTTLTADKSSSTAYMQLDSLTSDDSAVYYCVRGSSRGFDYWGQGTLVTVSA

SEQ ID NO: 140 - protein, 107 aa, synthetic construct
  source 1..107: note = Nkp46-4_VL
DIQMIQSPASLSVSVGETVTITCRASENIYSNLAWFQQKQGKSPQLLVYAATNLADGVPSRFSGSGSGTQYSLKINSLQSEDFGIYYCQHFWGTPRTFGGGTKLEIK

SEQ ID NO: 141 - protein, 115 aa, synthetic construct
  source 1..115: note = Nkp46-6_VH
QVQLQQPGSVLVRPGASVKLSCKASGYTFTSSWMHWAKQRPGQGLEWIGHIHPNSGISNYNEKFKGKATLTVDTSSSTAYVDLSSLTSEDSAVYYCARGGRFDDWGAGTTVTVSS

SEQ ID NO: 142 - protein, 108 aa, synthetic construct
  source 1..108: note = Nkp46-6_VL
DIVMTQSPATLSVTPGDRVSLSCRASQSISDYLHWYQQKSHESPRLLIKYASQSISGIPSRFSGSGSGSDFTLSINSVEPEDVGVYYCQNGHSFLMYTFGGGTKLEIK

SEQ ID NO: 143 - protein, 120 aa, synthetic construct
  source 1..120: note = Nkp46-9_VH
DVQLQESGPGLVKPSQSLSLTCTVTGYSITSDYAWNWIRQFPGNKLEWMGYITYSGSTNYNPSLKSRISITRDTSKNQFFLQLNSVTTEDTATYYCARCWDYALYAMDCWGQGTSVTVSS

SEQ ID NO: 144 - protein, 107 aa, synthetic construct
  source 1..107: note = Nkp46-9_VL
DIQMTQSPASLSASVGETVTITCRTSENIYSYLAWCQQKQGKSPQLLVYNAKTLAEGVPSRFSGSGSGTHFSLKINSLQPEDFGIYYCQHHYDTPLTFGAGTKLELK

SEQ ID NO: 145 - protein, 246 aa, synthetic construct
  source 1..246: note = Bab281_scFv
STGSQIQLVQSGPELQKPGETVKISCKASGYTFTNYGMNWVKQAPGKGLKWMGWINTNTGEPTYAEEFKGRFAFSLETSASTAYLQINNLKNEDTATYFCARDYLYYFDYWGQGTTLTVSSVEGGSGGSGGSGGSGGVDNIVMTQSPKSMSMSVGERVTLTCKASENVVTYVSWYQQKPEQSPKLLIYGASNRYTGVPDRFTGSGSATDFTLTISSVQAEDLADYHCGQGYSYPYTFGGGTKLEIK

SEQ ID NO: 146 - protein, 115 aa, synthetic construct
  source 1..115: note = 8B6A_VH
QVQLQQPGSELVRPGASVKLSCKASGYTFTSYWMHWVKQRPGQGLEWIGTIYPGSDITNYDEKFKNKATLTVDTSSSTAYMQLSSLTSEDSAVYYCTRDGRFANWGQGTLVTVSA

SEQ ID NO: 147 - protein, 105 aa, synthetic construct
  source 1..105: note = 8B6A_VL
EIVLTQSPAITAASLGQKVTITCSASSSVSYMHWYQQKSGTSPKPWIYEISKLASGVPARFSGSGSGTSYSLTISSMEAEDAAIYYCQQWNLPLTFGAGTKLELK

SEQ ID NO: 148 - protein, 115 aa, synthetic construct; identical to SEQ ID NO: 146
  source 1..115: note = 8B6B_VH

SEQ ID NO: 149 - protein, 107 aa, synthetic construct
  source 1..107: note = 8B6B_VL
EIQMTQSPSSLSASLGERVSLTCRASQDIGSSLNWLQQEPDGTIKRLIYATSSLDSGVPKRFSGSRSGSDYSLTISSLESEDFVDYYCLQYASSPYTFGGGTKLEIK

SEQ ID NO: 150 - protein, 117 aa, synthetic construct
  source 1..117: note = 9H11A_VH
QVQLQQPGAELVKPGASVKLSCKASGYTFTSYWMHWVKLRPGQGFEWIGEIIPSNGVTNYNEKFKRKATLTVDKSSSTAYMQLSSLTSEDSAVYYCTIRLRYALDYWGQGTSVTVSA

SEQ ID NO: 151 - protein, 107 aa, synthetic construct
  source 1..107: note = 9H11A_VL
DIQMTQTTSSLSASLGDRVTISCRASQDISNFLNWYQQKPDGTVKLLIYYTSRLHSGVPSRFSGSGSGTDYSLTISNLEQEDIATYFCQQGNTLPPTFGGGTKLEIK

SEQ ID NO: 152 - protein, 117 aa, synthetic construct; identical to SEQ ID NO: 150
  source 1..117: note = 9H11B_VH

SEQ ID NO: 153 - protein, 108 aa, synthetic construct
  source 1..108: note = 9H11B_VL
DIVMTQSQKFMSTSVGDRVSVTCKASQNVGTNVAWYQQKPGQSPKALIYSTSFRYSGVPDRFTGSGSGTDFTLTISNVQSEDLAEYFCQQYNSYPFTFGSGTKLEIKD

SEQ ID NO: 154 - protein, 115 aa, synthetic construct
  source 1..115: note = 17E1_VH
QVQLQQPGSVLVRPGASVKLSCKASGYTFTSSWMHWAKQRPGQGLEWIGHIHPNSGISNYNEKFKGKATLTVDTSSSTAYVDLSSLTSEDSAVYYCSRGGRFDDWGAGTTVTVSS

SEQ ID NO: 155 - protein, 107 aa, synthetic construct
  source 1..107: note = 17E1_VL
DIQMTQSPSSLSASLGERVSLTCRASQDIGSSLNWLQQEPDGTIKRLIYATSRLDSGVPKRFSGSRSGSDYSLTISSLESEDFVDYYCLQYASSPWTFGGGTKLEIK

SEQ ID NO: 156 - protein, 143 aa, synthetic construct
  source 1..143: note = Yissum_Variable HC
MGRLTSSFLLLIVPAYVLSQVTLKESGPGILQPSQTLSLTCSFSGFSLSTYGIGVGWNRQPSGKGLEWLAHIWWNDNEYYNIDLKSRLTISKDTSNNQVFLKIASVDTADTATYYCVRGNYRYARGYVMDYWGQGTSVTVSSA

SEQ ID NO: 157 - protein, 131 aa, synthetic construct
  source 1..131: note = Yissum_Variable LC
MESDTLLLWVLLLWVPGSTGDIVLTQSPASLAVSLGQRATISCRASESVEYYGTSLMQWYQQKPGQPPKLLIYAASNVESGVPARFSGSGSGTDFSLNIHPVEEDDFAMYFCQQNRKVPWTFGGGTKLEIK

SEQ ID NO: 158 - protein, 121 aa, synthetic construct
  source 1..121: note = NKp30_BGA1831_VH
QVQLVQSGAVVVKPGASVKVSCKASGYTFTSSWMHWARQAPGQGLEWIGEIHPNRDNTNYNEKFKGRATLTVDTSTSTAYMELSSLRSEDTAVYYCARSYYDYGGAYFDSWGQGTLVTVSS

SEQ ID NO: 159 - protein, 107 aa, synthetic construct
  source 1..107: note = NKp30_BGA1831_VL
QIVLTQSPSSLSASVGDRVTITCKASQDVSTAVAWYQQKPGKSPKLLIYAASYRHIGVPSRFSGSGSGTDFTFTISSLQPEDFATYYCQQHYSNPFTFGGGTKVEIK

SEQ ID NO: 160 - protein, 121 aa, synthetic construct
  source 1..121: note = NKp30_BGA1832_VH
QVQLVQSGAEVKKPGASVKVSCKASGYTFTSSYMHWVRQAPGQGLEWMGEIHPNRDNTNYNEKFKGRVTMTVDTSTSTVYMELSSLRSEDTAVYYCARSYYDYGGAYFDAWGQGTLVTVSS

SEQ ID NO: 161 - protein, 107 aa, synthetic construct
  source 1..107: note = NKp30_BGA1832_VL
DIQLTQSPSSLSASVGDRVTITCKASQDVSTAVAWYQQKPGKAPKLLIYAASYRHIGVPSRFSGSGSGTDFTLTISSLQPEDFATYYCQQHYSNPFTFGGGTKVEIK

SEQ ID NO: 162 - protein, 121 aa, synthetic construct
  source 1..121: note = NKp30_BGA1833_VH
QVQLVQSGAEVKKPGASVKVSCKASGYTFTSSYMHWVRQAPGQGLEWMGEIHPNRDNTNYNEKFKGRVTMTRDTSTSTVYMELSSLRSEDTAVYYCARSYYEYGGAYFDAWGQGTLVTVSS

SEQ ID NO: 163 - protein, 107 aa, synthetic construct
  source 1..107: note = NKp30_BGA1833_VL
QIQLTQSPSSLSASVGDRVTITCKASQDVSTAVAWYQQKPGKAPKLLIYAASYRHIGVPSRFSGSGSGTDFTLTISSLQPEDFATYYCQQHYSNPFTFGGGTKVEIK

SEQ ID NO: 164 - protein, 119 aa, synthetic construct
  source 1..119: note = Cetuximab_vh
QVQLKQSGPGLVQPSQSLSITCTVSGFSLTNYGVHWVRQSPGKGLEWLGVIWSGGNTDYNTPFTSRLSINKDNSKSQVFFKMNSLQSNDTAIYYCARALTYYDYEFAYWGQGTLVTVSA

SEQ ID NO: 165 - protein, 107 aa, synthetic construct
  source 1..107: note = Cetuximab_vl
DILLTQSPVILSVSPGERVSFSCRASQSIGTNIHWYQQRTNGSPRLLIKYASESISGIPSRFSGSGSGTDFTLSINSVESEDIADYYCQQNNNWPTTFGAGTKLELK

SEQ ID NO: 166 - protein, 119 aa, synthetic construct [sequence omitted]

SEQ ID NO: 167 - protein, 107 aa, synthetic construct [sequence omitted]

SEQ ID NO: 168 - protein, 123 aa, synthetic construct [sequence omitted]

SEQ ID NO: 169 - protein, 112 aa, synthetic construct [sequence omitted]

SEQ ID NO: 170 - protein, 121 aa, synthetic construct [sequence omitted]

SEQ ID NO: 171 - protein, 107 aa, synthetic construct [sequence omitted]

SEQ ID NO: 172 - protein, 119 aa, synthetic construct
  source 1..119: note = Pimurutamab_vh
EVQLVESGGGLVQPGGSLRLSCAASGFSLTNYGVHWVRQAPGKGLEWLGVIWSGGNTDYGNEFTSRFTISRDNAKNSLYLQMNSLRAEDTAVYYCARALDYYDYEFAYWGQGTMVTVSS

SEQ ID NO: 173 - protein, 107 aa, synthetic construct
  source 1..107: note = Pimurutamab_vl
EIVLTQSPATLSLSPGERATLSCRASQSIGTNIHWYQQKPGQAPRLLIKYASESISGIPARFSGSGSGTDFTLTISSLEPEDFAVYYCQQNNNWPTSFGGGTKVEIK

SEQ ID NO: 174 - protein, 125 aa, synthetic construct [sequence omitted]

SEQ ID NO: 175 - protein, 107 aa, synthetic construct [sequence omitted]

SEQ ID NO: 176 - protein, 120 aa, synthetic construct [sequence omitted]

SEQ ID NO: 177 - protein, 106 aa, synthetic construct [sequence omitted]

SEQ ID NO: 178 - protein, 121 aa, synthetic construct
  source 1..121: note = Matuzumab_vh
QVQLVQSGAEVKKPGASVKVSCKASGYTFTSHWMHWVRQAPGQGLEWIGEFNPSNGRTNYNEKFKSKATMTVDTSTNTAYMELSSLRSEDTAVYYCASRDYDYAGRYFDYWGQGTLVTVSS

SEQ ID NO: 179 - protein, 106 aa, synthetic construct [sequence omitted]

SEQ ID NO: 180 - protein, 119 aa, synthetic construct
  source 1..119: note = mAb-A based on panitumumab_vh
QVQLQESGPGLVKPSETLSLTCTVSGGSVSSGDYYWTWIRQSPGKGLEWIGHIYYSGNTNYNPRLKSRLTISIDTSKTQFSLKLSSVTAADTAIYYCVRDRVTGAFDIWGQGTMVTVSS

SEQ ID NO: 181 - protein, 107 aa, synthetic construct
  source 1..107: note = mAb-A based on panitumumab_vl
DIQMTQSPSSLSASVGDRVTITCQASQDISNYLNWYQQKPGKAPKLLIYDASNLETGVPSRFSGSGSGTDFTFTISSLQPEDIATYYCQHFDHLPLAFGGGTKVEIK

SEQ ID NO: 182 - protein, 119 aa, synthetic construct; identical to SEQ ID NO: 180
  source 1..119: note = mAb-B based on panitumumab_vh

SEQ ID NO: 183 - protein, 107 aa, synthetic construct
  source 1..107: note = mAb-B based on panitumumab_vl
DIQMTQSPSSLSASVGDRVTITCQASQDISNYLNWYQQKPGKAPKLLIYDASNLETGVPSRFSGSGSGTDFTFTISSLQPEDIATYYCQHFRHLPLAFGGGTKVEIK

SEQ ID NO: 184 - protein, 119 aa, synthetic construct
  source 1..119: note = mAb-C based on panitumumab_vh
QVQLQESGPGLVKPSETLSLTCTVSGGSVSSGDYYWTWIRQSPGKCLEWIGHIYYSGNTNYNPRLKSRLTISIDTSKTQFSLKLSSVTAADTAIYYCVRDRVTGAFDIWGQGTMVTVSS

SEQ ID NO: 185 - protein, 107 aa, synthetic construct
  source 1..107: note = mAb-C based on panitumumab_vl
DIQMTQSPSSLSASVGDRVTITCQASQDISNYLNWYQQKPGKAPKLLIYDASNLETGVPSRFSGSGSGTDFTFTISSLQPEDIATYYCQHFRHLPLAFGCGTKVEIK

SEQ ID NO: 186 - protein, 119 aa, synthetic construct [sequence omitted]

SEQ ID NO: 187 - protein, 107 aa, synthetic construct; identical to SEQ ID NO: 183
  source 1..107: note = mAb-D based on panitumumab_vl

SEQ ID NO: 188 - protein, 125 aa, synthetic construct
  source 1..125: note = blinatumomab_ScFV_HCVR
QVQLQQSGAELVRPGSSVKISCKASGYAFSSYWMNWVKQRPGQGLEWIGQIWPGDGDTNYNGKFKGKATLTADESSSTAYMQLSSLASEDSAVYFCARRETTTVGRYYYAMDYWGQGTTVTVSSG

SEQ ID NO: 189 - protein, 111 aa, synthetic construct
  source 1..111: note = blinatumomab_ScFV_LCVR
DIQLTQSPASLAVSLGQRATISCKASQSVDYDGDSYLNWYQQIPGQPPKLLIYDASNLVSGIPPRFSGSGSGTDFTLNIHPVEKVDAATYHCQQSTEDPWTFGGGTKLEIK

SEQ ID NO: 190 - protein, 119 aa, synthetic construct
  source 1..119: note = mogamulizumab_heavy_chain
EVQLVESGGDLVQPGRSLRLSCAASGFIFSNYGMSWVRQAPGKGLEWVATISSASTYSYYPDSVKGRFTISRDNAKNSLYLQMNSLRVEDTALYYCGRHSDGNFAFGYWGQGTLVTVSS

SEQ ID NO: 191 - protein, 112 aa, synthetic construct
  source 1..112: note = mogamulizumab_light_chain
DVLMTQSPLSLPVTPGEPASISCRSSRNIVHINGDTYLEWYLQKPGQSPQLLIYKVSNRFSGVPDRFSGSGSGTDFTLKISRVEAEDVGVYYCFQGSLLPWTFGQGTKVEIK

SEQ ID NO: 192 - protein, 121 aa, synthetic construct
  source 1..121: note = tafasitamab_MOR208_Heavy_chain
EVQLVESGGGLVKPGGSLKLSCAASGYTFTSYVMHWVRQAPGKGLEWIGYINPYNDGTKYNEKFQGRVTISSDKSISTAYMELSSLRSEDTAMYYCARGTYYYGTRVFDYWGQGTLVTVSS

SEQ ID NO: 193 - protein, 112 aa, synthetic construct
  source 1..112: note = tafasitamab_MOR208_Light_chain
DIVMTQSPATLSLSPGERATLSCRSSKSLQNVNGNTYLYWFQQKPGQSPQLLIYRMSNLNSGVPDRFSGSGSGTEFTLTISSLEPEDFAVYYCMQHLEYPITFGAGTKLEIK

SEQ ID NO: 194 - protein, 121 aa, synthetic construct
  source 1..121: note = inebilizumab_heavy_chain
EVQLVESGGGLVQPGGSLRLSCAASGFTFSSSWMNWVRQAPGKGLEWVGRIYPGDGDTNYNVKFKGRFTISRDDSKNSLYLQMNSLKTEDTAVYYCARSGFITTVRDFDYWGQGTLVTVSS

SEQ ID NO: 195 - protein, 111 aa, synthetic construct
  source 1..111: note = inebilizumab_light_chain
EIVLTQSPDFQSVTPKEKVTITCRASESVDTFGISFMNWFQQKPDQSPKLLIHEASNQGSGVPSRFSGSGSGTDFTLTINSLEAEDAATYYCQQSKEVPFTFGGGTKVEIK

SEQ ID NO: 196 - protein, 121 aa, synthetic construct [sequence omitted]

SEQ ID NO: 197 - protein, 106 aa, synthetic construct [sequence omitted]

SEQ ID NO: 198 - protein, 119 aa, synthetic construct
  source 1..119: note = obinutuzumab_heavy_chain
QVQLVQSGAEVKKPGSSVKVSCKASGYAFSYSWINWVRQAPGQGLEWMGRIFPGDGDTDYNGKFKGRVTITADKSTSTAYMELSSLRSEDTAVYYCARNVFDGYWLVYWGQGTLVTVSS

SEQ ID NO: 199 - protein, 112 aa, synthetic construct
  source 1..112: note = obinutuzumab_light_chain
DIVMTQTPLSLPVTPGEPASISCRSSKSLLHSNGITYLYWYLQKPGQSPQLLIYQMSNLVSGVPDRFSGSGSGTDFTLKISRVEAEDVGVYYCAQNLELPYTFGGGTKVEIK

SEQ ID NO: 200 - protein, 121 aa, synthetic construct
  source 1..121: note = ibritumomab variable heavy domain
QVQLQQPGAELVKAGASVKMSCKASGYTFTSYNMHWVKQTPGRGLEWIGAIYPGNGDTSYNQKFKGKATLTADKSSSTAYMQLSSLTSEDSAVYYCARSTYYGGDWYFNVWGAGTTVTVSA

SEQ ID NO: 201 - protein, 106 aa, synthetic construct [sequence omitted]

SEQ ID NO: 202 - protein, 122 aa, synthetic construct
  source 1..122: note = ofatumumab Genmab/GSK/Novartis_ofatumumab_heavy_chain
EVQLVESGGGLVQPGRSLRLSCAASGFTFNDYAMHWVRQAPGKGLEWVSTISWNSGSIGYADSVKGRFTISRDNAKKSLYLQMNSLRAEDTALYYCAKDIQYGNYYYGMDVWGQGTTVTVSS

SEQ ID NO: 203 - protein, 107 aa, synthetic construct
  source 1..107: note = ofatumumab Genmab/GSK/Novartis_ofatumumab_light_chain
EIVLTQSPATLSLSPGERATLSCRASQSVSSYLAWYQQKPGQAPRLLIYDASNRATGIPARFSGSGSGTDFTLTISSLEPEDFAVYYCQQRSNWPITFGQGTRLEIK

SEQ ID NO: 204 - protein, 122 aa, synthetic construct [sequence omitted]

SEQ ID NO: 205 - protein, 106 aa, synthetic construct [sequence omitted]

SEQ ID NO: 206 - protein, 122 aa, synthetic construct
  source 1..122: note = mosunetuzumab Genentech_mosunetuzumab_anti-CD20_heavy_chain
EVQLVESGGGLVQPGGSLRLSCAASGYTFTSYNMHWVRQAPGKGLEWVGAIYPGNGDTSYNQKEKGRFTISVDKSKNTLYLQMNSLRAEDTAVYYCARVVYYSNSYWYFDVWGQGTLVTVSS

SEQ ID NO: 207 - protein, 106 aa, synthetic construct
  source 1..106: note = mosunetuzumab Genentech_mosunetuzumab_anti-CD20_light_chain
DIQMTQSPSSLSASVGDRVTITCRASSSVSYMHWYQQKPGKAPKPLIYAPSNLASGVPSRFSGSGSGTDFTLTISSLQPEDFATYYCQQWSENPPTFGQGTKVEIK

SEQ ID NO: 208 - protein, 118 aa, synthetic construct
  source 1..118: note = ublituximab LFB_ublituximab_heavy_chain
QAYLQQSGAELVRPGASVKMSCKASGYTFTSYNMHWVKQTPRQGLEWIGGIYPGNGDTSYNQKFKGKATLTVGKSSSTAYMQLSSLTSEDSAVYFCARYDYNYAMDYWGQGTSVTVSS

SEQ ID NO: 209 - protein, 106 aa, synthetic construct
  source 1..106: note = ublituximab LFB_ublituximab_light_chain
QIVLSQSPAILSASPGEKVTMTCRASSSVSYMHWYQQKPGSSPKPWIYATSNLASGVPARFSGSGSGTSYSFTISRVEAEDAATYYCQQWTFNPPTFGGGTRLEIK

SEQ ID NO: 210 - protein, 121 aa, synthetic construct
  source 1..121: note = veltuzumab Immunomedics/Takeda_veltuzumab_heavy_chain
QVQLQQSGAEVKKPGSSVKVSCKASGYTFTSYNMHWVKQAPGQGLEWIGAIYPGMGDTSYNQKFKGKATLTADESTNTAYMELSSLRSEDTAFYYCARSTYYGGDWYFDVWGQGTTVTVSS

SEQ ID NO: 211 - protein, 106 aa, synthetic construct
  source 1..106: note = veltuzumab Immunomedics/Takeda_veltuzumab_light_chain
DIQLTQSPSSLSASVGDRVTMTCRASSSVSYIHWFQQKPGKAPKPWIYATSNLASGVPVRFSGSGSGTDYTFTISSLQPEDIATYYCQQWTSNPPTFGGGTKLEIK

SEQ ID NO: 212 - protein, 119 aa, synthetic construct; identical to SEQ ID NO: 198
  source 1..119: note = glofitamab Roche_glofitamab_anti-CD20_heavy_chain

SEQ ID NO: 213 - protein, 112 aa, synthetic construct; identical to SEQ ID NO: 199
  source 1..112: note = glofitamab Roche_glofitamab_anti-CD20_light_chain

SEQ ID NO: 214 - protein, 122 aa, synthetic construct
  source 1..122: note = epcoritamab (Abbvie/Genmab)_epcoritamab_anti-CD20_heavy_chain
EVQLVESGGGLVQPDRSLRLSCAASGFTFHDYAMHWVRQAPGKGLEWVSTISWNSGTIGYADSVKGRFTISRDNAKNSLYLQMNSLRAEDTALYYCAKDIQYGNYYYGMDVWGQGTTVTVSS

SEQ ID NO: 215 - protein, 107 aa, synthetic construct; identical to SEQ ID NO: 203
  source 1..107: note = epcoritamab (Abbvie/Genmab)_epcoritamab_anti-CD20_light_chain

SEQ ID NO: 216 - protein, 121 aa, synthetic construct
  source 1..121: note = TRU-015 (Pfizer and Trubion)_TRU-015_SMIP_HCVR
QAYLQQSGAESVRPGASVKMSCKASGYTFTSYNMHWVKQTPRQGLEWIGAIYPGNGDTSYNQKFKGKATLTVDKSSSTAYMQLSSLTSEDSAVYFCARVVYYSNSYWYFDVWGTGTTVTVS

SEQ ID NO: 217 - protein, 106 aa, synthetic construct [sequence omitted]

SEQ ID NO: 218 - protein, 127 aa, synthetic construct
  source 1..127: note = odronextamab (Regeneron)_odronextamab_heavy_chain_anti-CD20
EVQLVESGGGLVQPGRSLRLSCVASGFTFNDYAMHWVRQAPGKGLEWVSVISWNSDSIGYADSVKGRFTISRDNAKNSLYLQMHSLRAEDTALYYCAKDNHYGSGSYYYYQYGMDVWGQGTTVTVSS

SEQ ID NO: 219 - protein, 107 aa, synthetic construct
  source 1..107: note = odronextamab (Regeneron)_odronextamab_light_chain
EIVMTQSPATLSVSPGERATLSCRASQSVSSNLAWYQQKPGQAPRLLIYGASTRATGIPARFSGSGSGTEFTLTISSLQSEDFAVYYCQHYINWPLTFGGGTKVEIK

SEQ ID NO: 220 - protein, 121 aa, synthetic construct [sequence omitted]

SEQ ID NO: 221 - protein, 106 aa, synthetic construct [sequence omitted]

SEQ ID NO: 222 - protein, 121 aa, synthetic construct
  source 1..121: note = ocaratuzumab (Lilly)_Ocaratuzumab_Heavy_chain
EVQLVQSGAEVKKPGESLKISCKGSGRTFTSYNMHWVRQMPGKGLEWMGAIYPLTGDTSYNQKSKLQVTISADKSISTAYLQWSSLKASDTAMYYCARSTYVGGDWQFDVWGKGTTVTVSS

SEQ ID NO: 223 - protein, 106 aa, synthetic construct
  source 1..106: note = ocaratuzumab (Lilly)_Ocaratuzumab_Light_chain
EIVLTQSPGTLSLSPGERATLSCRASSSVPYIHWYQQKPGQAPRLLIYATSALASGIPDRFSGSGSGTDFTLTISRLEPEDFAVYYCQQWLSNPPTFGQGTKLEIK

SEQ ID NO: 224 - protein, 121 aa, synthetic construct
  source 1..121: note = divozilimab (Biocad)_divozilimab_heavy_chain
EVQLVQPGAEVVKPGASVKVSCKASGYTFTSYNMHWVRQAPGRGLEWMGAIYPGNGDTSYNQKFKGRVTMTRDKSTSTVYMELSSLRSEDTAVYYCARSTYYGGDWYFNVWGQGTLVTVSS

SEQ ID NO: 225 - protein, 106 aa, synthetic construct
  source 1..106: note = divozilimab (Biocad)_divozilimab_light_chain
QIVLSQSPAILSASPGERVTLTCRASSSVSYIHWFQQKPGKAPKPLIYATSNLASGVPSRFSGSGSGTDFSLTISRVEPEDFAVYYCQQWTSNPPTFGGGTKVEIK

SEQ ID NO: 226 - protein, 118 aa, synthetic construct
  source 1..118: note = [alphaClaudin18.2]_H0 Variable Heavy
QVQLQQPGAELVRPGASVKLSCKASGYTFTSYWINWVKQRPGQGLEWIGNIYPSDSYTNYNQKFKDKATLTVDKSSSTAYMQLSSPTSEDSAVYYCTRSWRGNSFDYWGQGTTLTVSS

SEQ ID NO: 227 - protein, 118 aa, synthetic construct
  source 1..118: note = [alphaClaudin18.2]_H1 Variable Heavy
EVQLVQSGAEVKKPGESLRISCKASGYTFTSYWINWVRQMPGKGLEWMGNIYPSDSYTNYNQKFQGHVTISVDKSISTAYLQWSSLKASDTAMYYCTRSWRGNSFDYWGQGTLVTVSS

SEQ ID NO: 228 - protein, 118 aa, synthetic construct
  source 1..118: note = [alphaClaudin18.2]_H2 Variable Heavy
QVQLVQSGAEVKKPGASVKVSCKASGYTFTSYWINWVRQAPGQGLEWMGNIYPSDSYTNYNQKFQGRVTMTVDKSTSTAYMELSSLRSEDTAVYYCTRSWRGNSFDYWGQGTLVTVSS

SEQ ID NO: 229 - protein, 113 aa, synthetic construct
  source 1..113: note = [alphaClaudin18.2]_L0 Variable Light
DIVMTQSPSSLTVTAGEKVTMSCKSSQSLLNSGNQKNYLTWYQQKPGQPPKLLIYWASTRESGVPDRFTGSGSGTDFTLTISSVQAEDLAVYYCQNDYSYPFTFGSGTKLEIK

SEQ ID NO: 230 - protein, 113 aa, synthetic construct
  source 1..113: note = [alphaClaudin18.2]_L1 Variable Light
DIVMTQSPDSLAVSLGERATINCKSSQSLLNSGNQKNYLTWYQQKPGQPPKLLIYWASTRESGVPDRFTGSGSGTDFTLTISSLQAEDVAVYYCQNDYSYPFTFGSGTKLEIK

SEQ ID NO: 231 - protein, 448 aa, synthetic construct
  source 1..448: note = Zolbetuximab (Astellas)_zolbetuximab_heavy_chain
QVQLQQPGAELVRPGASVKLSCKASGYTFTSYWINWVKQRPGQGLEWIGNIYPSDSYTNYNQKFKDKATLTVDKSSSTAYMQLSSPTSEDSAVYYCTRSWRGNSFDYWGQGTTLTVSSASTKGPSVFPLAPSSKSTSGGTAALGCLVKDYFPEPVTVSWNSGALTSGVHTFPAVLQSSGLYSLSSVVTVPSSSLGTQTYICNVNHKPSNTKVDKRVEPKSCDKTHTCPPCPAPELLGGPSVFLFPPKPKDTLMISRTPEVTCVVVDVSHEDPEVKFNWYVDGVEVHNAKTKPREEQYNSTYRVVSVLTVLHQDWLNGKEYKCKVSNKALPAPIEKTISKAKGQPREPQVYTLPPSREEMTKNQVSLTCLVKGFYPSDIAVEWESNGQPENNYKTTPPVLDSDGSFFLYSKLTVDKSRWQQGNVFSCSVMHEALHNHYTQKSLSLSPGK

SEQ ID NO: 232 - protein, 220 aa, synthetic construct
  source 1..220: note = Zolbetuximab (Astellas)_zolbetuximab_light_chain
DIVMTQSPSSLTVTAGEKVTMSCKSSQSLLNSGNQKNYLTWYQQKPGQPPKLLIYWASTRESGVPDRFTGSGSGTDFTLTISSVQAEDLAVYYCQNDYSYPFTFGSGTKLEIKRTVAAPSVFIFPPSDEQLKSGTASVVCLLNNFYPREAKVQWKVDNALQSGNSQESVTEQDSKDSTYSLSSTLTLSKADYEKHKVYACEVTHQGLSSPVTKSFNRGEC

SEQ ID NO: 233 - protein, 121 aa, synthetic construct
  source 1..121: note = belantamab_variable heavy_chain
QVQLVQSGAEVKKPGSSVKVSCKASGGTFSNYWMHWVRQAPGQGLEWMGATYRGHSDTYYNQKFKGRVTITADKSTSTAYMELSSLRSEDTAVYYCARGAIYDGYDVLDNWGQGTLVTVSS

SEQ ID NO: 234 - protein, 107 aa, synthetic construct
  source 1..107: note = BELANTAMAB_variable LIGHT_CHAIN
DIQMTQSPSSLSASVGDRVTITCSASQDISNYLNWYQQKPGKAPKLLIYYTSNLHSGVPSRFSGSGSGTDFTLTISSLQPEDFATYYCQQYRKLPWTFGQGTKLEIK

SEQ ID NO: 235 - protein, 115 aa, synthetic construct
  source 1..115: note = ELRANATAMAB_BCMA_variable HEAVY_CHAIN
EVQLLESGGGLVQPGGSLRLSCAASGFTFSSYPMSWVRQAPGKGLEWVSAIGGSGGSLPYADIVKGRFTISRDNSKNTLYLQMNSLRAEDTAVYYCARYWPMDIWGQGTLVTVSS

SEQ ID NO: 236 - protein, 108 aa, synthetic construct
  source 1..108: note = ELRANATAMAB_BCMA_variable LIGHT_CHAIN
EIVLTQSPGTLSLSPGERATLSCRASQSVSSSYLAWYQQKPGQAPRLLMYDASIRATGIPDRFSGSGSGTDFTLTISRLEPEDFAVYYCQQYQSWPLTFGQGTKVEIK

SEQ ID NO: 237 - protein, 121 aa, synthetic construct
  source 1..121: note = TECLISTAMAB_ANTI-BCMA_variable HEAVY_CHAIN
QLQLQESGPGLVKPSETLSLTCTVSGGSISSGSYFWGWIRQPPGKGLEWIGSIYYSGITYYNPSLKSRVTISVDTSKNQFSLKLSSVTAADTAVYYCARHDGAVAGLFDYWGQGTLVTVSS

SEQ ID NO: 238 - protein, 108 aa, synthetic construct
  source 1..108: note = TECLISTAMAB_ANTI-BCMA_variable LIGHT_CHAIN
SYVLTQPPSVSVAPGQTARITCGGNNIGSKSVHWYQQPPGQAPVVVVYDDSDRPSGIPERFSGSNSGNTATLTISRVEAGDEAVYYCQVWDSSSDHVVFGGGTKLTVL

SEQ ID NO: 239 - protein, 119 aa, synthetic construct
  source 1..119: note = labetuzumab_VH
EVQLVESGGGVVQPGRSLRLSCSASGFDFTTYWMSWVRQAPGKGLEWIGEIHPDSSTINYAPSLKDRFTISRDNAKNTLFLQMDSLRPEDTGVYFCASLYFGFPWFAYWGQGTPVTVSS

SEQ ID NO: 240 - protein, 106 aa, synthetic construct
  source 1..106: note = labetuzumab_VL
DIQLTQSPSSLSASVGDRVTITCKASQDVGTSVAWYQQKPGKAPKLLIYWTSTRHTGVPSRFSGSGSGTDFTFTISSLQPEDIATYYCQQYSLYRSFGQGTKVEIK

SEQ ID NO: 241 - protein, 120 aa, synthetic construct [sequence omitted]

SEQ ID NO: 242 - protein, 107 aa, synthetic construct [sequence omitted]

SEQ ID NO: 243 - protein, 121 aa, synthetic construct
  source 1..121: note = cibisatamab_VH
QVQLVQSGAEVKKPGASVKVSCKASGYTFTEFGMNWVRQAPGQGLEWMGWINTKTGEATYVEEFKGRVTFTTDTSTSTAYMELRSLRSDDTAVYYCARWDFAYYVEAMDYWGQGTTVTVSS

SEQ ID NO: 244 - protein, 108 aa, synthetic construct
  source 1..108: note = cibisatamab_VL
DIQMTQSPSSLSASVGDRVTITCKASAAVGTYVAWYQQKPGKAPKLLIYSASYRKRGVPSRFSGSGSGTDFTLTISSLQPEDFATYYCHQYYTYPLFTFGQGTKLEIK

SEQ ID NO: 245 - protein, 121 aa, synthetic construct
  source 1..121: note = A5B7_VH
EVKLVESGGGLVQPGGSLRLSCATSGFTFTDYYMNWVRQPPGKALEWLGFIGNKANGYTTEYSASVKGRFTISRDKSQSILYLQMNTLRAEDSATYYCTRDRGLRFYFDYWGQGTTLTVSS

SEQ ID NO: 246 - protein, 106 aa, synthetic construct
  source 1..106: note = A5B7_VL
QTVLSQSPAILSASPGEKVTMTCRASSSVTYIHWYQQKPGSSPKSWIYATSNLASGVPARFSGSGSGTSYSLTISRVEAEDAATYYCQHWSSKPPTFGGGTKLEIK

SEQ ID NO: 247 - protein, 121 aa, synthetic construct
  source 1..121: note = AMG 211 B9 (US8394926)_VH
EVQLVESGGGLVQPGRSLRLSCAASGFTVSSYWMHWVRQAPGKGLEWVGFIRNKANGGTTEYAASVKGRFTISRDDSKNTLYLQMNSLRAEDTAVYYCARDRGLRFYFDYWGQGTTVTVSS

SEQ ID NO: 248 - protein, 116 aa, synthetic construct
  source 1..116: note = AMG 211 B9 (US8394926)_VL
QAVLTQPASLSASPGASASLTCTLRRGINVGAYSIYWYQQKPGSPPQYLLRYKSDSDKQQGSGVSSRFSASKDASANAGILLISGLQSEDEADYYCMIWHSGASAVFGGGTKLTVL

SEQ ID NO: 249 - protein, 121 aa, synthetic construct
  source 1..121: note = E12 (US9982063)_VH
EVQLVESGGGLVQPGRSLRLSCAASGFTVSSYWMHWVRQAPGKGLEWVGFILNKANGGTTEYAASVKGRFTISRDDSKNTLYLQMNSLRAEDTAVYYCARDRGLRFYFDYWGQGTTVTVSS

SEQ ID NO: 250 - protein, 116 aa, synthetic construct; identical to SEQ ID NO: 248
  source 1..116: note = E12 (US9982063)_VL

SEQ ID NO: 251 - protein, 119 aa, synthetic construct
  source 1..119: note = A5 (US9695250)_VH
EVQLVESGGGVVQPGRSLRLSCAASGFTLSTYAMHWVRQAPGKGLEWVALISNDGSNKYYADSVKGRFTISRDNSKNTLYLQMNSLRAEDTAVYYCARDRGLRFYFDYWGQGTTVTVSS

SEQ ID NO: 252 - protein, 116 aa, synthetic construct; identical to SEQ ID NO: 248
  source 1..116: note = A5 (US9695250)_VL

SEQ ID NO: 253 - protein, 119 aa, synthetic construct
  source 1..119: note = D8 (US9695250)_VH
EVQLVESGGGVVQPGRSLRLSCAASGFTLSTYAMHWVRQAPGKGLEWVALISNDGSNKYYADSVKGRFTISRDNSKNTLYLQMNSLRAEDTAVYYCTRDRGLRFYFDYWGQGTTVTVSS

SEQ ID NO: 254 - protein, 116 aa, synthetic construct; identical to SEQ ID NO: 248
  source 1..116: note = D8 (US9695250)_VL

SEQ ID NO: 255 - protein, 120 aa, synthetic construct
  source 1..120: note = MFE-23 (US5876691)_VH
QVKLQQSGAELVRSGTSVKLSCTASGFNIKDSYMHWLRQGPEQGLEWIGWIDPENGDTEYAPKFQGKATFTTDTSSNTAYLQLSSLTSEDTAVYYCNEGTPTGPYYFDYWGQGTTVTVSS

SEQ ID NO: 256 - protein, 106 aa, synthetic construct
  source 1..106: note = MFE-23 (US5876691)_VL
ENVLTQSPAIMSASPGEKVTITCSASSSVSYMHWFQQKPGTSPKLWIYSTSNLASGVPARFSGSGSGTSYSLTISRMEAEDAATYYCQQRSSYPLTFGAGTKLELK

SEQ ID NO: 257 - protein, 121 aa, synthetic construct
  source 1..121: note = T84.66, M5A and M5B_US7776330B2_5 (T84.66 VH-VL)_VH
EVQLQQSGAELVEPGASVKLSCTASGFNIKDTYMHWVKQRPEQGLEWIGRIDPANGNSKYVPKFQGKATITADTSSNTAYLQLTSLTSEDTAVYYCAPFGYYVSDYAMAYWGQGTSVTVSS

SEQ ID NO: 258 - protein, 111 aa, synthetic construct
  source 1..111: note = T84.66, M5A and M5B_US7776330B2_5 (T84.66 VH-VL)_VL
DIVLTQSPASLAVSLGQRATMSCRAGESVDIFGVGFLHWYQQKPGQPPKLLIYRASNLESGIPVRFSGTGSRTDFTLIIDPVEADDVATYYCQQTNEDPYTFGGGTKLEIK

SEQ ID NO: 259 - protein, 121 aa, synthetic construct
  source 1..121: note = US7776330B2_2 (M5A VH-VL - humanized T84.66)_VH
EVQLVESGGGLVQPGGSLRLSCAASGFNIKDTYMHWVRQAPGKGLEWVARIDPANGNSKYADSVKGRFTISADTSKNTAYLQMNSLRAEDTAVYYCAPFGYYVSDYAMAYWGQGTLVTVSS

SEQ ID NO: 260 - protein, 111 aa, synthetic construct
  source 1..111: note = US7776330B2_2 (M5A VH-VL - humanized T84.66)_VL
DIQLTQSPSSLSASVGDRVTITCRAGESVDIFGVGFLHWYQQKPGKAPKLLIYRASNLESGVPSRFSGSGSRTDFTLTISSLQPEDFATYYCQQTNEDPYTFGQGTKVEIK

SEQ ID NO: 261 - protein, 121 aa, synthetic construct
  source 1..121: note = US7776330B2_3 (M5B VH-VL - humanized T84.66)_VH
EVQLVESGGGLVQPGGSLRLSCAASGFNIKDTYMHWVRQAPGKGLEWVARIDPANGNSKYVPKFQGRATISADTSKNTAYLQMNSLRAEDTAVYYCAPFGYYVSDYAMAYWGQGTLVTVSS

SEQ ID NO: 262 - protein, 111 aa, synthetic construct; identical to SEQ ID NO: 260
  source 1..111: note = US7776330B2_3 (M5B VH-VL - humanized T84.66)_VL

SEQ ID NO: 263 - protein, 120 aa, synthetic construct
  source 1..120: note = Shanghai Haikang_US9056911B2_1 (Shanghai  Haikang HC-LC)_VH
QVQLQQSGAELVRSGASIKLSCTASGFNIKHYYMHWVKQRPEQGLEWIGWINPENVDTEYAPKFQGKATMTADTSSNTAYLQLSSLTSEDTAVYYCNHYRYAGGGALDYWGQGTTVTVSS

SEQ ID NO: 264 - protein, 106 aa, synthetic construct
  source 1..106: note = Shanghai Haikang_US9056911B2_1 (Shanghai  Haikang HC-LC)_VL
DIQLTQSPAIMSASPGEKVTMTCSASSSVSYIHWYQQKSGTSPKRWVYDTSKLASGVPARFSGSGSGTSYSLTISTMEAEDAATYYCQQWNNNPYSFGGGTKVVIK

SEQ ID NO: 265 - protein, 118 aa, synthetic construct
  source 1..118: note = tinurilimab_variable heavy_chain
QVTLRESGPALVKPTQTLTLTCTFSGFSLSTYGIGVGWIRQPPGKALEWLAHIWWNDNKYYSTSLKTRLTISKDTSKNQVVLTMTNMDPVDTATYYCARISLPYFDYWGQGTTLTVSS

SEQ ID NO: 266 - protein, 107 aa, synthetic construct
  source 1..107: note = tinurilimab_variable light_chain
DIQLTQSPSFLSASVGDRVTITCKASQNVGTAVAWYQQKPGKAPKLLIYSASNRYTGVPSRFSGSGSGTEFTLTISSLQPEDFATYYCQQYSSYPLTFGGGTKVEIK

SEQ ID NO: 267 - protein, 449 aa, synthetic construct
  source 1..449: note = IMC-EB10_vh
EVQLVQSGAEVKKPGASVKVSCKASGYTFTSYYMHWVRQAPGQGLEWMGIINPSGGSTSYAQKFQGRVTMTRDTSTSTVYMELSSLRSEDTAVYYCARGVGAHDAFDIWGQGTTVTVSSASTKGPSVFPLAPSSKSTSGGTAALGCLVKDYFPEPVTVSWNSGALTSGVHTFPAVLQSSGLYSLSSVVTVPSSSLGTQTYICNVNHKPSNTKVDKRVEPKSCDKTHTCPPCPAPELLGGPSVFLFPPKPKDTLMISRTPEVTCVVVDVSHEDPEVKFNWYVDGVEVHNAKTKPREEQYNSTYRVVSVLTVLHQDWLNGKEYKCKVSNKALPAPIEKTISKAKGQPREPQVYTLPPSREEMTKNQVSLTCLVKGFYPSDIAVEWESNGQPENNYKTTPPVLDSDGSFFLYSKLTVDKSRWQQGNVFSCSVMHEALHNHYTQKSLSLSPGK

SEQ ID NO: 268 - protein, 219 aa, synthetic construct
  source 1..219: note = IMC-EB10_vl
DVVMTQSPLSLPVTPGEPASISCRSSQSLLHSNGNNYLDWYLQKPGQSPQLLIYLGSNRASGVPDRFSGSGSDTDFTLQISRVEAEDVGVYYCMQGTHPAISFGQGTRLEIKRTVAAPSVFIFPPSDEQLKSGTASVVCLLNNFYPREAKVQWKVDNALQSGNSQESVTEQDSKDSTYSLSSTLTLSKADYEKHKVYACEVTHQGLSSPVTKSFNRGEC

SEQ ID NO: 269 - protein, 119 aa, synthetic construct
  source 1..119: note = EB10_vh
EVQLVQSGAEVKKPGASVKVSCKASGYTFTSYYMHWVRQAPGQGLEWMGIINPSGGSTSYAQKFQGRVTMTRDTSTSTVYMELSSLRSEDTAVYYCARGVGAHDAFDIWGQGTTVTVSS

SEQ ID NO: 270 - protein, 112 aa, synthetic construct
  source 1..112: note = EB10_vl
DVVMTQSPLSLPVTPGEPASISCRSSQSLLHSNGNNYLDWYLQKPGQSPQLLIYLGSNRASGVPDRFSGSGSDTDFTLQISRVEAEDVGVYYCMQGTHPAISFGQGTRLEIK

SEQ ID NO: 271 - protein, 122 aa, synthetic construct
  source 1..122: note = NC7_vh
EVQLVQSGAEVKKPGSSVKVSCKASGGTFSSYAISWVRQAPGQGLEWMGGIIPIFGTANYAQKFQGRVTITADKSTSTAYMELSSLRSEDTAVYYCATFALFGFREQAFDIWGQGTTVTVSS

SEQ ID NO: 272 - protein, 107 aa, synthetic construct
  source 1..107: note = NC7_vl
DIQMTQSPSSLSASVGDRVTITCRASQSISSYLNWYQQKPGKAPKLLIYAASSLQSGVPSRFSGSGSGTDFTLTISSLQPEDLATYYCQQSYSTPFTFGPGTKVDIK

SEQ ID NO: 273 - protein, 118 aa, synthetic construct
  source 1..118: note = D4-3_vh
EVQLVQSGAEVKKPGASVKVSCKASGYTFTSYYMHWARQAPGQGLEWMGIINPSGGSTSYAQKFQGRVTMTRDTSTSTVYMELSSLRSEDTAVYYCARVVAAAVADYWGQGTLVTVSS

SEQ ID NO: 274 - protein, 112 aa, synthetic construct
  source 1..112: note = D4-3_vl
DVVMTQSPLSLPVTPGEPASISCRSSQSLLHSNGYNYLDWYLQKPGQSPQLLIYLGSNRASGVPDRFSGSGSGTDFTLKISRVEAEDVGVYYCMQSLQTPFTFGPGTKVDIK

SEQ ID NO: 275 - protein, 120 aa, synthetic construct [sequence omitted]

SEQ ID NO: 276 - protein, 107 aa, synthetic construct [sequence omitted]

SEQ ID NO: 277 - protein, 119 aa, synthetic construct [sequence omitted]

SEQ ID NO: 278 - protein, 107 aa, synthetic construct [sequence omitted]

SEQ ID NO: 279 - protein, 115 aa, synthetic construct
  source 1..115: note = disitamab_heavy_chain
EVQLVQSGAEVKKPGATVKISCKVSGYTFTDYYIHWVQQAPGKGLEWMGRVNPDHGDSYYNQKFKDKATITADKSTDTAYMELSSLRSEDTAVYFCARNYLFDHWGQGTLVTVSS

SEQ ID NO: 280 - protein, 105 aa, synthetic construct
  source 1..105: note = disitamab_light_chain
DIQMTQSPSSVSASVGDRVTITCKASQDVGTAVAWYQQKPGKAPKLLIYWASIRHTGVPSRFSGSGSGTDFTLTISSLQPEDFATYYCHQFATYTFGGGTKVEIK

SEQ ID NO: 281 - protein, 120 aa, synthetic construct
  source 1..120: note = MGAH22_heavy_chain
QVQLQQSGPELVKPGASLKLSCTASGFNIKDTYIHWVKQRPEQGLEWIGRIYPTNGYTRYDPKFQDKATITADTSSNTAYLQVSRLTSEDTAVYYCSRWGGDGFYAMDYWGQGASVTVSS

SEQ ID NO: 282 - protein, 107 aa, synthetic construct
  source 1..107: note = MGAH22_light_chain
DIVMTQSHKFMSTSVGDRVSITCKASQDVNTAVAWYQQKPGHSPKLLIYSASFRYTGVPDRFTGSRSGTDFTFTISSVQAEDLAVYYCQQHYTTPPTFGGGTKVEIK

SEQ ID NO: 283 - protein, 120 aa, synthetic construct
  source 1..120: note = zanidatamab_heavy_chain_1
GEVQLVESGGGLVQPGGSLRLSCAASGFTFADYTMDWVRQAPGKGLEWVGDVNPNSGGSIYNQRFKGRFTFSVDRSKNTLYLQMNSLRAEDTAVYYCARNLGPSFYFDYWGQGTLVTVSS

SEQ ID NO: 284 - protein, 108 aa, synthetic construct
  source 1..108: note = zanidatamab_light_chain_1
GDIQMTQSPSSLSASVGDRVTITCKASQDVSIGVAWYQQKPGKAPKLLIYSASYRYTGVPSRFSGSGSGTDFTLTISSLQPEDFATYYCQQYYIYPATFGQGTKVEIK

SEQ ID NO: 285 - protein, 121 aa, synthetic construct
  source 1..121: note = zenocutuzumab_heavy_chain_anti-Her2
QVQLVQSGAEVKKPGASVKLSCKASGYTFTAYYINWVRQAPGQGLEWIGRIYPGSGYTSYAQKFQGRATLTADESTSTAYMELSSLRSEDTAVYFCARPPVYYDSAWFAYWGQGTLVTVSS

SEQ ID NO: 286 - protein, 107 aa, synthetic construct
  source 1..107: note = zenocutuzumab_light_chain
DIQMTQSPSSLSASVGDRVTITCRASQSISSYLNWYQQKPGKAPKLLIYAASSLQSGVPSRFSGSGSGTDFTLTISSLQPEDFATYYCQQSYSTPPTFGQGTKVEIK

SEQ ID NO: 287 - protein, 120 aa, synthetic construct [sequence omitted]

SEQ ID NO: 288 - protein, 107 aa, synthetic construct [sequence omitted]

SEQ ID NO: 289 - protein, 124 aa, synthetic construct
  source 1..124: note = MESO-A[MSLN]_H1.1_vh
EVQLVESGGGLVQPGGSLKLSCAASGFDFSRYWMSWVRQAPGKGLEWVSEINPDSSTIVYTPSVKGRFTISRDNAKNSLYLQMNSLRAEDTAVYYCARRGSHYYGYRTGYFDVWGAGTTVTVSS

SEQ ID NO: 290 - protein, 5 aa, synthetic construct
  source 1..5: note = MESO-A[MSLN]_H1.1_vhCDR1
RYWMS

SEQ ID NO: 291 - protein, 17 aa, synthetic construct
  source 1..17: note = MESO-A[MSLN]_H1.1_vhCDR2
EINPDSSTIVYTPSVKG

SEQ ID NO: 292 - protein, 15 aa, synthetic construct
  source 1..15: note = MESO-A[MSLN]_H1.1_vhCDR3
RGSHYYGYRTGYFDV

SEQ ID NO: 293 - protein, 106 aa, synthetic construct
  source 1..106: note = MESO-A[MSLN]_L1_vl
DVVLTQSPATLSLSPGERATLSCRASSSVSYMYWHQQKPDQSPKLLIYDTSNLASGVPVRFSGSGSGTDYTLTISSLEPEDFAVYYCQQWSSYPPTFGGGTKLEIK

SEQ ID NO: 294 - protein, 10 aa, synthetic construct
  source 1..10: note = MESO-A[MSLN]_L1_vlCDR1
RASSSVSYMY

SEQ ID NO: 295 - protein, 7 aa, synthetic construct
  source 1..7: note = MESO-A[MSLN]_L1_vlCDR2
DTSNLAS

SEQ ID NO: 296 - protein, 9 aa, synthetic construct
  source 1..9: note = MESO-A[MSLN]_L1_vlCDR3
QQWSSYPPT

SEQ ID NO: 297 - protein, 123 aa, synthetic construct
  source 1..123: note = MESO-B[MSLN]_H0_vh
QVQLQQSGPGLVTPSQTLSLTCAISGDSVSSNSATWNWIRQSPSRGLEWLGRTYYRSKWYNDYAVSVKSRMSINPDTSKNQFSLQLNSVTPEDTAVYYCARGMMTYYYGMDVWGQGTTVTVSS

SEQ ID NO: 298 - protein, 7 aa, synthetic construct
  source 1..7: note = MESO-B[MSLN]_H0_vhCDR1
SNSATWN

SEQ ID NO: 299 - protein, 18 aa, synthetic construct
  source 1..18: note = MESO-B[MSLN]_H0_vhCDR2
RTYYRSKWYNDYAVSVKS

SEQ ID NO: 300 - protein, 11 aa, synthetic construct
  source 1..11: note = MESO-B[MSLN]_H0_vhCDR3
GMMTYYYGMDV

SEQ ID NO: 301 - protein, 115 aa, synthetic construct
  source 1..115: note = MESO-B[MSLN]_L0_vl
QPVLTQSSSLSASPGASASLTCTLRSGINVGPYRIYWYQQKPGSPPQYLLNYKSDSDKQQGSGVPSRFSGSKDASANAGVLLISGLRSEDEADYYCMIWHSSAAVFGGGTQLTVL

SEQ ID NO: 302 - protein, 14 aa, synthetic construct
  source 1..14: note = MESO-B[MSLN]_L0_vlCDR1
TLRSGINVGPYRIY

SEQ ID NO: 303 - protein, 7 aa, synthetic construct
  source 1..7: note = MESO-B[MSLN]_L0_vlCDR2
SDKQQGS

SEQ ID NO: 304 - protein, 9 aa, synthetic construct
  source 1..9: note = MESO-B[MSLN]_L0_vlCDR3
MIWHSSAAV

SEQ ID NO: 305 - protein, 120 aa, synthetic construct
  source 1..120: note = MESO-C[MSLN]_H1_vh
QVQLVQSGAEVKKPGASVKVSCKASGYTFTSYWMHWVRQAPGQGLEWMGMIHPNSDNTIYYEKFQGRVTMTVDKSISTAYMELSRLRSDDTAVYYCAIIITPVVPKFDYWGQGTLVTVSS

SEQ ID NO: 306 - protein, 5 aa, synthetic construct
  source 1..5: note = MESO-C[MSLN]_H1_vhCDR1
SYWMH

SEQ ID NO: 307 - protein, 17 aa, synthetic construct
  source 1..17: note = MESO-C[MSLN]_H1_vhCDR2
MIHPNSDNTIYYEKFQG

SEQ ID NO: 308 - protein, 11 aa, synthetic construct
  source 1..11: note = MESO-C[MSLN]_H1_vhCDR3
IITPVVPKFDY

SEQ ID NO: 309 - protein, 107 aa, synthetic construct
  source 1..107: note = MESO-C[MSLN]_L1_vl
DIVMTQSPDSLAVSLGERATINCKASHDVGTSVAWYQQKPGQSPKLLIYWASTRHTGVPDRFTGSGSGTDFTLTISSLQAEDVAVYFCQQYSSYPLTFGAGTKLEIK

SEQ ID NO: 310 - protein, 11 aa, synthetic construct
  source 1..11: note = MESO-C[MSLN]_L1_vlCDR1
KASHDVGTSVA

SEQ ID NO: 311 - protein, 7 aa, synthetic construct
  source 1..7: note = MESO-C[MSLN]_L1_vlCDR2
WASTRHT

SEQ ID NO: 312 - protein, 9 aa, synthetic construct
  source 1..9: note = MESO-C[MSLN]_L1_vlCDR3
QQYSSYPLT

SEQ ID NO: 313 - protein, 131 aa, synthetic construct
  source 1..131: note = BMS-986148_VH
EVHLVESGGGLVQPGGSLRLSCAASGFTFSRYWMSWVRQAQGKGLEWVASIKQAGSEKTYVDSVKGRFTISRDNAKNSLSLQMNSLRAEDTAVYYCAREGAYYYDSASYYPYYYYYSMDVWGQGTTVTVSS

SEQ ID NO: 314 - protein, 108 aa, synthetic construct
  source 1..108: note = BMS-986148_VL
EIVLTQSPGTLSLSPGERATLSCRASQSVSSSYLAWYQQKPGQAPRLLIYGASSRATGIPDRFSGSGSGTDFTLTISRLEPEDFAVYYCQQYGSSQYTFGQGTKLEIK

SEQ ID NO: 315 - protein, 113 aa, synthetic construct
  source 1..113: note = Roche RG7882_VH
DIQMTQSPSSLSASVGDRVTITCKSSQSVLYSSNQKNYLAWFQQKPGKAPKLLIYWASTRESGVPSRFSGSGSGTDFTLTISSLQPEDFATYFCHQYLSSYTFGQGTKVEIKR

SEQ ID NO: 316 - protein, 115 aa, synthetic construct
  source 1..115: note = Roche RG7882_VL
EVQLVESGGGLVQPGGSLRLSCAASGYTFTTYWMHWVRQAPGKGLEWVGYIRPSTGYTEYNQKFKDRFTISADTSKNTAYLQMNSLRAEDTAVYYCARSRWLLDYWGQGTLVTVS

SEQ ID NO: 317 - protein, 124 aa, synthetic construct
  source 1..124: note = New1_VH
QVKLKQSGGGLVQPGGSLKVSCAASGFDFSRYWMSWVRQAPGKGLEWIGEINPDSSTIVYTPSLKDKFIMSRDNAKNTLYLQTSKVRSADTALYYCARRGSHYYGYRTGYFDVWGAGTTVTVSS

SEQ ID NO: 318 - protein, 106 aa, synthetic construct
  source 1..106: note = New1_VL
DVVLTQSPAIMSASPGEKVTMTCSASSSVSYMYWGQQKPGSSPRLLIYDTSNLASGVPVRFSGSGSGTSYSLTISRMEAEDAATYYCQQWSSYPPTFGGGTKLEIK

SEQ ID NO: 319 - protein, 120 aa, synthetic construct
  source 1..120: note = New2_VH
QVQLQQPGAELVKPGASMKLSCKASGYTFTSYWMHWVKQRPGQGLEWIGMIHPNSDNTIYYEKFKSKATLTVDKSSSTAYMQLSSLTSEDSAVYYCAIIITPVVPKFDYWGQGTTLTVSS

SEQ ID NO: 320 - protein, 107 aa, synthetic construct
  source 1..107: note = New2_VL
DIVMTQSHQFMSTSVGDRVSVTCKASHDVGTSVAWYQQKPGQSPKLLIYWASTRHTGVPDRFTGSGSGTDFTLTISNVQSEDLADYFCQQYSSYPLTFGAGTKLELK

SEQ ID NO: 321 - protein, 123 aa, synthetic construct
  source 1..123: note = New3_VH
EVKLVESGGGLVQPGGSLSLSCAASGFTFTDYYMSWVRQPPGRALEWLGFIRGKANGYTTEYSASVKGRFTISRDYSQSILYLHMNALRAEDSATYSCARYYYSNYVWYFDVWGTGTTVTVSS

SEQ ID NO: 322 - protein, 107 aa, synthetic construct
  source 1..107: note = New3_VL
DIVMTQSQKFMSTSVGDRVSVTCKASQNVGTNVAWYQQKPGLSPKVLIHSASYRFSGVPDRFTGSGSGTDFTLSISNVQSEDLAKYFCQQYNSYPLTFGAGTKLELK

SEQ ID NO: 323 - protein, 128 aa, synthetic construct
  source 1..128: note = New4_VH
QVQLVQSGAEVKKPGASVKVSCQASGYTFTSNYMHWVRQAPGQGLEWMGIINPSDGSTTYAQRFQGRVTMTRDTSTSRVYMELSSLRSEDTAVYYCAREGAGFGPASYVSPYYAMDVWGQGTTVTVSS

SEQ ID NO: 324 - protein, 109 aa, synthetic construct
  source 1..109: note = New4_VL
ETTLTQSPGTLSLSPGERATLSCRASQSVSSYFLAWYQQKPGQAPRLLIYGASSRASGIPDRFSGSGSGTDFTLTISRLEPEDFAVYYCQEYGGSTLATFGPGTKVDIK

SEQ ID NO: 325 - protein, 123 aa, synthetic construct; identical to SEQ ID NO: 297
  source 1..123: note = New5_VH

SEQ ID NO: 326 - protein, 114 aa, synthetic construct
  source 1..114: note = New5_VL
QPVLTQSSSLSASPGASASLTCTLRSGINVGPRIYWYQQKPGSPPQYLLNYKSDSDKQQGSGVPSRFSGSKDASANAGVLLISGLRSEDEADYYCMIWHSSAAVFGGGTQLTVL

SEQ ID NO: 327 - protein, 117 aa, synthetic construct
  source 1..117: note = New6_VH
EVQLLESGGGLVQPGGSLRPSCAASGFTFSSYAMSWVRQAPGKGLEWVSAISGSGGSTHYADSVKGRFTISRDNSKNTLYLQMNSLRAEDTAVYYCVRGGALGFDNWGRGTMVTVSS

SEQ ID NO: 328 - protein, 107 aa, synthetic construct
  source 1..107: note = New6_VL
VLTQPPSVSEAPRQRVTISCSGSTSNIGSNVVNWYQQFPGKPPKVVIYYDDLVASGVSDRFSGSRSGTSASLAISGLQSEDEADYYCSAWDDSLNAWVFGGGTKVTV

SEQ ID NO: 329 - protein, 119 aa, synthetic construct
  source 1..119: note = New7_VH
QVQLQQSGPELEKPGASVKLSCKASGYSFTGYTMNWVKQSHGKSLEWIGLITPYNGASSYNQKFRGKATLTVDKSSSTAYMDLLSLTSEDSAVYFCARGGYDGRGFDYWGQGTTVTVSS

SEQ ID NO: 330 - protein, 106 aa, synthetic construct
  source 1..106: note = New7_VL
DIELTQSPAIMSASPGEKVTMTCSASSSVSYMHWYQQKSGTSPKRWIYDTSKLASGVPGRFSGSGSGNSYSLTISSVEAEDDATYYCQQWSGYPLTFGAGTKLEIK

SEQ ID NO: 331 - protein, 119 aa, synthetic construct
  source 1..119: note = Same reference new8_VH
QVQLQQSGPELEKPGASVKLSCKASGYSFTGYTMNWVKQSHGKCLEWIGLITPYNGASSYNQKFRGKATLTVDKSSSTAYMDLLSLTSEDSAVYFCARGGYDGRGFDYWGQGTTVTVSS

SEQ ID NO: 332 - protein, 106 aa, synthetic construct
  source 1..106: note = Same reference new8_VL
DIELTQSPAIMSASPGEKVTMTCSASSSVSYMHWYQQKSGTSPKRWIYDTSKLASGVPGRFSGSGSGNSYSLTISSVEAEDDATYYCQQWSKHPLTFGCGTKLEIK

SEQ ID NO: 333 - protein, 119 aa, synthetic construct
  source 1..119: note = New9_VH
EVQLQQSGPELEQPGASVKLSCKASGYSFTGYTMNWVKQSHGKCLEWIGLITPYNGASSYNQKFRGKATLTVDKSQSTAYMDLLNLTNEDSAVYFCARGGYDGRGFDYWGQGTTVTVSS

SEQ ID NO: 334 - protein, 106 aa, synthetic construct
  source 1..106: note = New9_VL
DIELTQDPAIMSASPGEQVTMTCSASSSVSYMHWYQQKSGTSPKRWIYDTSKLASGVPDRFSGSGSGNSYSLTISSVEEEDDATYYCQQWSKHPLTFGCGTKLEIE

SEQ ID NO: 335 - protein, 119 aa, synthetic construct
  source 1..119: note = Next 3_VH
QVQLQQSGPELEKPGASVKISCKASGYSFTGYTMNWVKQSHGKSLEWIGLITPYNGASSYNQKFRGKATLTVDKSSSTAYMDLLSLTSEDSAVYFCARGGYDGRGFDYWGSGTPVTVSS

SEQ ID NO: 336 - protein, 106 aa, synthetic construct
  source 1..106: note = Next 3_VL
DIELTQSPAIMSASPGEKVTMTCSASSSVSYMHWYQQKSGTSPKRWIYDTSKLASGVPGRFSGSGSGNSYSLTISSVEAEDDATYYCQQWSKHPLTFGSGTKVEIK

SEQ ID NO: 337 - protein, 119 aa, synthetic construct
  source 1..119: note = MsAb-2_VH
QVQLVQSGAEVKKPGASVKVSCKASGYSFTGYTMNWVRQAPGQGLEWMGLITPYNGASSYNQKFRGRVTMTRDTSTSTVYMELSSLRSEDTAVYYCARGGYDGRGFDYWGSGTPVTVSS

SEQ ID NO: 338 - protein, 106 aa, synthetic construct
  source 1..106: note = MsAb-2_VL
EIVLTQSPATLSLSPGERATLSCSASSSVSYMHWYQQKPGQAPRLLIYDTSKLASGVPARFSGSGSGTDFTLTISSLEPEDFAVYYCQQWSKHPLTFGSGTKVEIK

SEQ ID NO: 339 - protein, 119 aa, synthetic construct
  source 1..119: note = MsAb-3_VH
QVQLVQSGAEVKKPGASVKVSCKASGYSFTGYTMNWVKQAPGQGLEWIGLITPYNGASSYNQKFRGKATMTRDTSTSTVYMELSSLRSEDTAVYFCARGGYDGRGFDYWGSGTPVTVSS

SEQ ID NO: 340 - protein, 106 aa, synthetic construct
  source 1..106: note = MsAb-3_VL
EIVLTQSPATLSLSPGERATMTCSASSSVSYMHWYQQKPGQAPRLLIYDTSKLASGVPARFSGSGSGTDFTLTISSLEPEDFAVYYCQQWSKHPLTFGSGTKVEIK

SEQ ID NO: 341 - protein, 121 aa, synthetic construct
  source 1..121: note = MF-J_VH
QVELVQSGAEVKKPGESLKISCKGSGYSFTNYWIGWVRQMPGKGLEWMGVIMPSDSYTRYSPSFQGQVTISADKSISTAYLQWSSLKASDTAMYYCARYGHGMYGGALDVWGQGTLVTVSS

SEQ ID NO: 342 - protein, 108 aa, synthetic construct
  source 1..108: note = MF-J_VL
DIVLTQSPATLSLSPGERATLSCRASQSVRSSRLAWYQQKPGQAPRLLIYGASKRATGVPARFSGSGSGTDFTLTISSLEPEDFATYYCQQYYDFPPTFGQGTKVEIK

SEQ ID NO: 343 - protein, 121 aa, synthetic construct
  source 1..121: note = Moro6640_VH
QVQLVQSGAEVKKPGESLKISCKGSGYSFTNYWIGWVRQMPGKGLEWMGVIMPSDSYTRYSPSFQGQVTISADKSISTAYLQWSSLKASDTAMYYCARYGHGMYGGALDVWGQGTLVTVSS

SEQ ID NO: 344 - protein, 109 aa, synthetic construct
  source 1..109: note = Moro6640_VL
DIVLTQSPATLSLSPGERATLSCRASQSVRSSRLAWYQQKPGQAPRLLIYGASKRATGVPARFSGSGSGTDFTLTISSLEPEDFAVYYCQQYSHDPSGTFGQGTKVEIK

SEQ ID NO: 345 - protein, 119 aa, synthetic construct
  source 1..119: note = MF-226_VH
QVELVQSGAEVKKPGASVKVSCKASGYTFTGNYINWVRQAPGQGLEWMGIINPHGGDTKYAQKFQGRVTMTRDTSISTAYMELSSLRSEDTAVYYCARWHHGTWIFDYWGQGTLVTVSS

SEQ ID NO: 346 - protein, 109 aa, synthetic construct
  source 1..109: note = MF-226_VL
DIVLTQPPSVSGAPGQRVTISCSGSSSNIGSNYVSWYQQLPGTAPKLLIYNDNQRPSGVPDRFSGSKSGTSASLAITGLQSEDEADYYCSTYDRRTFSVFGGGTKLTVL

SEQ ID NO: 347 - protein, 121 aa, synthetic construct
  source 1..121: note = Moro7265_VH
QVQLVQSGAEVKKPGESLKISCKGSGYSFTNYWIGWVRQMPGKGLEWMGFIWPVDSWTQYSPSFQGQVTISADKSISTAYLQWSSLKASDTAMYYCARYGHGMYGGALDVWGQGTLVTVSS

SEQ ID NO: 348 - protein, 109 aa, synthetic construct; identical to SEQ ID NO: 344
  source 1..109: note = Moro7265_VL

SEQ ID NO: 349 - protein, 121 aa, synthetic construct; identical to SEQ ID NO: 347
  source 1..121: note = MOR06631_VH

SEQ ID NO: 350 - protein, 108 aa, synthetic construct; identical to SEQ ID NO: 342
  source 1..108: note = MOR06631_VL

SEQ ID NO: 351 - protein, 121 aa, synthetic construct
  source 1..121: note = MOR06669_VH
QVQLVQSGAEVKKPGESLKISCKGSGYSFTNYWIGWVRQMPGKGLEWMGIIWPIDSFTQYSPSFQGQVTISADKSISTAYLQWSSLKASDTAMYYCARYGHGMYGGALDVWGQGTLVTVSS

SEQ ID NO: 352 - protein, 108 aa, synthetic construct; identical to SEQ ID NO: 342
  source 1..108: note = MOR06669_VL

SEQ ID NO: 353 - protein, 121 aa, synthetic construct; identical to SEQ ID NO: 343
  source 1..121: note = MOR07111_VH

SEQ ID NO: 354 - protein, 108 aa, synthetic construct
  source 1..108: note = MOR07111_VL
DIVLTQSPATLSLSPGERATLSCRASQSVRSSRLAWYQQKPGQAPRLLIYGASKRATGVPARFSGSGSGTDFTLTISSLEPEDFAVYYCQQFYSKPITFGQGTKVEIK

SEQ ID NO: 355 - protein, 121 aa, synthetic construct; identical to SEQ ID NO: 343
  source 1..121: note = MORO6642_VH

SEQ ID NO: 356 - protein, 109 aa, synthetic construct
  source 1..109: note = MORO6642_VL
DIVLTQSPATLSLSPGERATLSCRASQSVRSSRLAWYQQKPGQAPRLLIYGASKRATGVPARFSGSGSGTDFTLTISSLEPEDFAVYYCQQYSQDPSSTFGQGTKVEIK

SEQ ID NO: 357 - protein, 121 aa, synthetic construct
  source 1..121: note = MOR06643_VH
QVQLVESGGGLVQPGGSLRLSCAASGFTFSDYAMSWVRQAPGKGLEWVSAIMYDSSSTFYADSVKGRFTISRDNSKNTLYLQMNSLRAEDTAVYYCARINYIYKGVHFDYWGQGTLVTVSS

SEQ ID NO: 358 - protein, 108 aa, synthetic construct
  source 1..108: note = MOR06643_VL
DIVLTQSPATLSLSPGERATLSCRASQIVSGYLAWYQQKPGQAPRLLIYGASSRATGVPARFSGSGSGTDFTLTISSLEPEDFAVYYCQQWSLRSPFTFGQGTKVEIK

SEQ ID NO: 359 - protein, 119 aa, synthetic construct
  source 1..119: note = MOR06626_VH
QVQLVQSGAEVKKPGASVKVSCKASGYTFTGNYINWVRQAPGQGLEWMGIINPTKGWTLYAQKFQGRVTMTRDTSISTAYMELSSLRSEDTAVYYCARWHHGTWIFDYWGQGTLVTVSS

SEQ ID NO: 360 - protein, 109 aa, synthetic construct; identical to SEQ ID NO: 346
  source 1..109: note = MOR06626_VL

SEQ ID NO: 361 - protein, 121 aa, synthetic construct
  source 1..121: note = MOR06635_VH
QVQLVQSGAEVKKPGESLKISCKGSGYSFTNYWIGWVRQMPGKGLEWMGFIWPSDSWTSYSPSFQGQVTISADKSISTAYLQWSSLKASDTAMYYCARYGHGMYGGALDVWGQGTLVTVSS

SEQ ID NO: 362 - protein, 108 aa, synthetic construct; identical to SEQ ID NO: 342
  source 1..108: note = MOR06635_VL

SEQ ID NO: 363 - protein, 119 aa, synthetic construct
  source 1..119: note = MOR06638_VH
QVQLVQSGAEVKKPGASVKVSCKASGYTFTGNYINWVRQAPGQGLEWMGIINPHGGDTKYAQKFQGRVTMTRDTSISTAYMELSSLRSEDTAVYYCARWHHGTWIFDYWGQGTLVTVSS

SEQ ID NO: 364 - protein, 110 aa, synthetic construct
  source 1..110: note = MOR06638_VL
DIVLTQPPSVSGAPGQRVTISCSGSSSNIGSNYVSWYQQLPGTAPKLLIYNDNQRPSGVPDRFSGSKSGTSASLAITGLQSEDEADYYCSSWDRADGSYVFGGGTKLTVL

SEQ ID NO: 365 - protein, 115 aa, synthetic construct
  source 1..115: note = MF-A_VH
QVQLVQSGAEVKKPGSSVKVSCKASGGTFSSYYFSWVRQAPGQGLEWMGGIIPKFGSANYAQKFQGRVTITADESTSTAYMELSSLRSEDTAVYYCARRTSMDYWGQGTLVTVSS

SEQ ID NO: 366 - protein, 111 aa, synthetic construct
  source 1..111: note = MF-A_VL
DIALTQPASVSGSPGQSITISCTGTSSDVGGYNYVSWYQQHPGKAPKLMIYSVSKRPSGVSNRFSGSKSGNTASLTISGLQAEDEADYYCGAWAHMSLGKVFGGGTKLTVL

SEQ ID NO: 367 - protein, 115 aa, synthetic construct; identical to SEQ ID NO: 365
  source 1..115: note = MORo6657_VH

SEQ ID NO: 368 - protein, 111 aa, synthetic construct
  source 1..111: note = MORo6657_VL
DIALTQPASVSGSPGQSITISCTGTSSDVGGYNYVSWYQQHPGKAPKLMIYSVSKRPSGVSNRFSGSKSGNTASLTISGLQAEDEADYYCATWDHSQMGKVFGGGTKLTVL

SEQ ID NO: 369 - protein, 121 aa, synthetic construct; identical to SEQ ID NO: 357
  source 1..121: note = MF-L_VH

SEQ ID NO: 370 - protein, 107 aa, synthetic construct
  source 1..107: note = MF-L_VL
DIVLTQSPATLSLSPGERATLSCRASQIVSGYLAWYQQKPGQAPRLLIYGASSRATGVPARFSGSGSGTDFTLTISSLEPEDFATYYCQQYYNFSFTFGQGTKVEIK

SEQ ID NO: 371 - protein, 116 aa, synthetic construct
  source 1..116: note = MF-1_VH
QVQLQESGPGLVKPGETLSLTCTVSGGSISNYYWSWIRQAPGKGLEWIGEIYHSGGTYYNPSLKGRVTISVDTSKNQFSLKLSSVTAEDTAVYYCARPMDNLPDIWGQGTLVTVSS

SEQ ID NO: 372 - protein, 107 aa, synthetic construct
  source 1..107: note = MF-1_VL
DIQMTQSPSSLSASVGDRVTITCRASQNIGSYLNWYQQKPGKAPKLLIYNSSTLQSGVPSRFSGSGSGTDFTLTISSLQPEDFATYYCQQRSNMPITFGQGTKVEIK

SEQ ID NO: 373 - protein, 116 aa, synthetic construct
  source 1..116: note = MF-5_VH
QVQLVESGGGLVQPGGSLRLSCAASGFTFSSYGMSWVRQAPGKGLEWVSGISYSSSATYYADSVKGRFTISRDNSKNTLYLQMNSLRAEDTAVYYCARYLYYFDVWGQGTLVTVSS

SEQ ID NO: 374 - protein, 109 aa, synthetic construct
  source 1..109: note = MF-5_VL
DIALTQPASVSGAPGQRVTISCTGTSSDVGASDTVTWYQQHPGKAPKLMIYAVNKRPSGVSNRFSGSKSGNTASLTISGLQAEDEADYYCASRDSSSMVFGGGTKLTVL

SEQ ID NO: 375 - protein, 115 aa, synthetic construct
  source 1..115: note = MF-8_VH
QVQLVESGGGLVQPGGSLRLSCAASGFTFSNSWMSWVRQAPGKGLEWVSAITYWGSNTYYADSVKGRFTISRDNSKNTLYLQMNSLRAEDTAVYYCARTKFFANWGQGTLVTVSS

SEQ ID NO: 376 - protein, 112 aa, synthetic construct
  source 1..112: note = MF-8_VL
DIVMTQSPLSLPVTPGEPASISCRSSQSLLHSNGYTYLSWYLQKPGQSPQLLIYLGSKRASGVPDRFSGSGSGTDFTLKISRVEAEDVGVYYCQQYYDSSSTFGQGTKVEIK

SEQ ID NO: 377 - protein, 115 aa, synthetic construct
  source 1..115: note = MF-24_VH
QVQLVQSGAEVKKPGSSVKVSCKASGGTFSNYSISWVRQAPGQGLEWMGRIIPNFGTANYAQKFQGRVTITADESTSTAYMELSSLRSEDTAVYYCARGIYFAFWGQGTLVTVSS

SEQ ID NO: 378 - protein, 110 aa, synthetic construct
  source 1..110: note = MF-24_VL
DIVLTQPPSVSGAPGQRVTISCSGSSSNIGPNYVSWYQQLPGTAPKLLIHGNANRPSGVPDRFSGSKSGTSASLAITGLQSEDEADYYCQSYDFFTNSSVFGGGTKLTVL

SEQ ID NO: 379 - protein, 120 aa, synthetic construct
  source 1..120: note = MF-25_VH
QVQLVQSGAEVKKPGASVKVSCKASGYTFTSYALHWVRQAPGQGLEWMGIINPQNGGTNYAQKFQGRVTMTRDTSISTAYMELSSLRSEDTAVYYCARKHKYRIGSMDVWGQGTLVTVSS

SEQ ID NO: 380 - protein, 108 aa, synthetic construct
  source 1..108: note = MF-25_VL
DIVLTQSPATLSLSPGERATLSCRASQSLTSNQLAWYQQKPGQAPRLLIYDSSNRATGVPARFSGSGSGTDFTLTISSLEPEDFAVYYCQQYGSFPATFGQGTKVEIK

SEQ ID NO: 381 - protein, 117 aa, synthetic construct
  source 1..117: note = MF-27_VH
QVQLVQSGAEVKKPGESLKISCKGSGYSFTNYWIGWVRQMPGKGLEWMGIIDPRESFTRYSPSFQGQVTISADKSISTAYLQWSSLKASDTAMYYCARYMKGGYDYWGQGTLVTVSS

SEQ ID NO: 382 - protein, 111 aa, synthetic construct
  source 1..111: note = MF-27_VL
DIALTQPASVSGSPGQSITISCTGTSSDVGGNNFVSWYQQHPGKAPKLMIYYGDSRPSGVSNRFSGSKSGNTASLTISGLQAEDEADYYCQSWDAPMGMWVFGGGTKLTVL

SEQ ID NO: 383 - protein, 120 aa, synthetic construct
  source 1..120: note = MF-73_VH
QVQLQQSGPGLVKPSQTLSLTCAISGDSVSSRSAAWGWIRQSPGRGLEWLGRIGYRSKWMNDYAVSVKSRITINPDTSKNQFSLQLNSVTPEDTAVYYCARMQGFQLDYWGQGTLVTVSS

SEQ ID NO: 384 - protein, 107 aa, synthetic construct
  source 1..107: note = MF-73_VL
DIQMTQSPSSLSASVGDRVTITCRASQTISSALAWYQQKPGKAPKLLIYGASTLQSGVPSRFSGSGSGTDFTLTISSLQPEDFATYYCQQYYSYSVTFGQGTKVEIK

SEQ ID NO: 385 - protein, 115 aa, synthetic construct
  source 1..115: note = MF-78_VH
QVQLVQSGAEVKKPGSSVKVSCKASGGTFSNYSLHWVRQAPGQGLEWMGGIVPIFGTANYAQKFQGRVTITADESTSTAYMELSSLRSEDTAVYYCARTYTFAVWGQGTLVTVSS

SEQ ID NO: 386 - protein, 110 aa, synthetic construct
  source 1..110: note = MF-78_VL
DIALTQPASVSGSPGQSITISCTGTSSDVGNFNYVNWYQQHPGKAPKLMIYSVSSRPSGVSNRFSGSKSGNTASLTISGLQAEDEADYYCGAYTTDTLSVFGGGTKLTVL

SEQ ID NO: 387 - protein, 116 aa, synthetic construct
  source 1..116: note = MF-84_VH
QVQLVESGGGLVQPGGSLRLSCAASGFTFSSYAMNWVRQAPGKGLEWVSGISGNGSNTYYADSVKGRFTISRDNSKNTLYLQMNSLRAEDTAVYYCARKWLFYDYWGQGTLVTVSS

SEQ ID NO: 388 - protein, 108 aa, synthetic construct
  source 1..108: note = MF-84_VL
DIVLTQSPATLSLSPGERATLSCRASQSVTSNYLAWYQQKPGQAPRLLIYGSSSRATGVPARFSGSGSGTDFTLTISSLEPEDFAVYYCQQYSDIPATFGQGTKVEIK

SEQ ID NO: 389 - protein, 114 aa, synthetic construct
  source 1..114: note = MF-101_VH
QVQLVQSGAEVKKPGASVKVSCKASGYTFTIYDMHWVRQAPGQGLEWMGYISPYSGDTNYAQKFQGRVTMTRDTSISTAYMELSSLRSEDTAVYYCARGWQDFWGQGTLVTVSS

SEQ ID NO: 390 - protein, 107 aa, synthetic construct
  source 1..107: note = MF-101_VL
DIQMTQSPSSLSASVGDRVTITCRASQSINRSLTWYQQKPGKAPKLLIYAASNLQSGVPSRFSGSGSGTDFTLTISSLQPEDFAVYYCLQVYNLPLTFGQGTKVEIK

SEQ ID NO: 391 - protein, 126 aa, synthetic construct
  source 1..126: note = MF-230_VH
QVQLQQSGPGLVKPSQTLSLTCAISGDSVSSNSAAWGWIRQSPGRGLEWLGRISYRSRWYNNYAVSVKSRITINPDTSKNQFSLQLNSVTPEDTAVYYCARYYSDHFGLYPYFDYWGQGTLVTVSS

SEQ ID NO: 392 - protein, 107 aa, synthetic construct; identical to SEQ ID NO: 390
  source 1..107: note = MF-230_VL

SEQ ID NO: 393 - protein, 126 aa, synthetic construct
  source 1..126: note = MF-236_VH
QVQLVQSGAEVKKPGESLKISCKGSGYSFNTSWIWVRQMPGKGLEWMGIIHPGHSYTRYSPSFQGQVTISADKSISTAYLQWSSLKASDTAMYYCARGDGGPSSQGNYFGWVYDVWGQGTLVTVSS

SEQ ID NO: 394 - protein, 108 aa, synthetic construct
  source 1..108: note = MF-236_VL
DIELTQPPSVSVAPGQTARISCSGDNIPNFYVHWYQQKPGQAPVLVIYEDSDRPSGIPERFSGSNSGNTATLTISGTQAEDEADYYCQSYDKPTFSGVFGGGTKLTVL

SEQ ID NO: 395 - protein, 125 aa, synthetic construct
  source 1..125: note = MF252_VH
QVQLQQSGPGLVKPSQTLSLTCAISGDSVSSNSAAWSWIRQSPGRGLEWLGRIYYRSKKWYNDYAVSVKSRITINPDTSKNQFSLQLNSVTPEDTAVYYCARNYSGPMYYYGDVWGQGTLVTVSS

SEQ ID NO: 396 - protein, 111 aa, synthetic construct
  source 1..111: note = MF252_VL
DIALTQPASVSGSPGQSITISCTGTSSDIGRYHYVSWYQQHPGKAPKVMIYSVSKRPSGVSNRFSGSKSGNTASLTISGLQAEDEADYYCSAYDTNNYLSVFGGGTKLTVL

SEQ ID NO: 397 - protein, 123 aa, synthetic construct
  source 1..123: note = MF-275_VH
QVQLQQSGPGLVKPSQTLSLTCAISGDSVSSNSAAWSWIRQSPGRGLEWLGRIQYRSKWYNAYAVSVKSRITINPDTSKNQFSLQLNSVTPEDTAVYYCARGFHGSTMYFDVWGQGTLVTVSS

SEQ ID NO: 398 - protein, 106 aa, synthetic construct
  source 1..106: note = MF-275_VL
DIVLTQPPSVSGAPGQRVTISCSGSSSNIGNNSVNWYQQLPGTAPKLLIYNNQRPSGVPDRFSGSKSGTSASLAITGLQSEDEADYYCQAYASNIVFGGGTKLTVL

SEQ ID NO: 399 - protein, 117 aa, synthetic construct
  source 1..117: note = MF-423_VH
QVQLVQSGAEVKKPGESLKISCKGSGYSFTTYWIGWVRQAPGKGLEWMGFIYPDKSYTNYSPSFQGQVTISADKSISTAYLQWSSLKASDTAMYYCARGLGGSFDVWGQGTLVTVSS

SEQ ID NO: 400 - protein, 109 aa, synthetic construct
  source 1..109: note = MF-423_VL
DIALTQPASVSGSPGQSITISCTGTSSDVGDYNYVSWYQQHPGKAPKLMIYRVDNRPSGVSNRFSGSKSGNTASLTISGLQAEDEADYYCQSWVGPSTVFGGGTKLTVL

SEQ ID NO: 401 - protein, 120 aa, synthetic construct
  source 1..120: note = MF-428_VH
QVQLVESGGGLVQPGGSLRLSCAASGFTFSTYAMSWVRQAPGKGLEWVSFISGYGSSTYYADSVKGRFTISRDNSKNTLYLQMNSLRAEDTAVYYCARKMYWWSDGFDYWGQGTLVTVSS

SEQ ID NO: 402 - protein, 106 aa, synthetic construct
  source 1..106: note = MF-428_VL
DIELTQPPSVSVAPGQTARISCSGDNLRSKYAHWYQQKPGQAPVLVIYSKDNRPSGIPERFSGSNSGNTATLTISGTQAEDEADYYCSSWAHDHKVFGGGTKLTVL

SEQ ID NO: 403 - protein, 121 aa, synthetic construct
  source 1..121: note = MF-C_VH
QVQLVESGGGLVQPGGSLRLSCAASGFTFSRYAISWVRQAPGKGLEWVSSISGGGSKTFYADSVKGRFTISRDNSKNTLYLQMNSLRAEDTAVYYCARYPGPTGHVFFDIWGQGTLVTVSS

SEQ ID NO: 404 - protein, 108 aa, synthetic construct
  source 1..108: note = MF-C_VL
DIELTQPPSVSVAPGQTARISCSGDNIGSKVATWYQQKPGQAPVLVIYYDNDRPSGIPERFSGSNSGNTATLTISGTQAEDEADYYCQSYDGQMSTSVFGGGTKLTVL

SEQ ID NO: 405 - protein, 116 aa, synthetic construct
  source 1..116: note = MF-I_VH
QVQLVQSGAEVKKPGSSVKVSCKASGGTFSSYYISWVRQAPGQGLEWMGGIIPKFGTANYAQKFQGRVTITADESTSTAYMELSSLRSEDTAVYYCARTIGIYDSWGQGTLVTVSS

SEQ ID NO: 406 - protein, 111 aa, synthetic construct
  source 1..111: note = MF-I_VL
DIALTQPASVSGSPGQSITISCTGTSSDVGGYNYVSWYQQHPGKAPKLMIYSVNNRPSGVSNRFSGSKSGNTASLTISGLQAEDEADYYCSTYDHTSSGFVFGGGTKLTVL

SEQ ID NO: 407 - protein, 115 aa, synthetic construct
  source 1..115: note = MF-I_VH
QVQLVQSGAEVKKPGSSVKVSCKASGGTFSSHAISWVRQAPGQGLEWMGNIMPIFGVANYAQKFQGRVTITADESTSTAYMELSSLRSEDTAVYYCAREMRLAYWGQGTLVTVSS

SEQ ID NO: 408 - protein, 109 aa, synthetic construct
  source 1..109: note = MF-I_VL
DIALTQPASVSGSPGQSITISCTGTSSDIGHFNYVSWYQQHPGKAPKLMIYSVISRPSGVSNRFSGSKSGNTASLTISGLQAEDEADYYCASFTFPSLVFGGGTKLTVL

SEQ ID NO: 409 - protein, 126 aa, synthetic construct
  source 1..126: note = MF-P_VH
QVQLQQSGPGLVKPSQTLSLTCAISGDSVSSNTAAWSWIRQSPGRGLEWLGRIRYRSKWYNDYAVSVKSRITINPDTSKNQFSLQLNSVTPEDTAVYYCARGYHQGLYGNHMFDVWGQGTLVTVSS

SEQ ID NO: 410 - protein, 110 aa, synthetic construct
  source 1..110: note = MF-P_VL
DIVLTQPPSVSGAPGQRVTISCSGSSSNIGSHTVNWYQQLPGTAPKLLIYDVNKRPSGVPDRFSGSKSGTSASLAITGLQSEDEADYYCASWDSVQVSPVFGGGTKLTVL

SEQ ID NO: 411 - protein, 118 aa, synthetic construct
  source 1..118: note = MF-Q_VH
QVQLKESGPALVKPTQTLTLTCTFSGFSLSSSGVGVSWIRQPPGKALEWLALIDWDDDKSYSTSLKTRLTISKDTSKNQVVLTMTNMDPVDTATYYCARIQGWNYDVWGQGTLVTVSS

SEQ ID NO: 412 - protein, 109 aa, synthetic construct
  source 1..109: note = MF-Q_VL
DIVLTQPPSVSGAPGQRVTISCSGSSSNIGNNRVSWYQQLPGTAPKLLIYGNNKRPSGVPDRFSGSKSGTSASLAITGLQSEDEADYYCSAWDLLEVYVFGGGTKLTVL

SEQ ID NO: 413 - protein, 120 aa, synthetic construct
  source 1..120: note = MF-S_VH
QVQLQQSGPGLVKPSQTLSLTCAISGDSVSSSSAAWSWIRQSPGRGLEWLGRIGQRSKWYNDYAVSVKSRITINPDTSKNQFSLQLNSVTPEDTAVYYCARSRFGYFDVWGQGTLVTVSS

SEQ ID NO: 414 - protein, 109 aa, synthetic construct
  source 1..109: note = MF-S_VL
DIALTQPASVSGSPGQSITISCTGTSSDIGTYNHVSWYQQHPGKAPKLMIYNVNKRPSGVSNRFSGSKSGNTASLTISGLQAEDEADYYCSAYAPSAVVFGGGTKLTVL

SEQ ID NO: 415 - protein, 118 aa, synthetic construct
  source 1..118: note = MF-U_VH
QVQLVESGGGLVQPGGSLRLSCAASGFTFSSHYSWVRQAPGKGLEWVSTISSNGSYTYYADSVKGRFTISRDNSKNTLYLQMNSLRAEDTAVYYCARFVARLNVFDYWGQGTLVTVSS

SEQ ID NO: 416 - protein, 111 aa, synthetic construct
  source 1..111: note = MF-U_VL
DIVLTQPPSVSGAPGQRVTISCTGSSSNIGIGYDVNWYQQLPGTAPKLLIYKNTNRPSGVPDRFSGSKSGTSASLAITGLQSEDEADYYCSSYDSFHHGIVFGGGTKLTVL

SEQ ID NO: 417 - protein, 115 aa, synthetic construct
  source 1..115: note = MF-V_VH
QVQLVQSGAEVKKPGSSVKVSCKASGGTFSNYTISWVRQAPGQGLEWMGNIIPAFGYANYAQKFQGRVTITADESTSTAYMELSSLRSEDTAVYYCARKFTFDVWGQGTLVTVSS

SEQ ID NO: 418 - protein, 111 aa, synthetic construct
  source 1..111: note = MF-V_VL
DIALTQPASVSGSPGQSITISCTGTSSDLGGYSYVSWYQQHPGKAPKLMIYNVNNRPSGVSNRFSGSKSGNTASLTISGLQAEDEADYYCSSYDYVSSDTVFGGGTKLTVL

SEQ ID NO: 419 - protein, 118 aa, synthetic construct
  source 1..118: note = MF-W_VH
QVQLVESGGGLVQPGGSLRLSCAASGFTFSSYYSWVRQAPGKGLEWVSNISGNGSSTYYADSVKGRFTISRDNSKNTLYLQMNSLRAEDTAVYYCARLIATLGTFDYWGQGTLVTVSS

SEQ ID NO: 420 - protein, 111 aa, synthetic construct
  source 1..111: note = MF-W_VL
DIALTQPASVSGSPGQSITISCTGTSSDVGGYNYVSWYQQHPGKAPKVMIYGVTKRPSGVSNRFSGSKSGNTASLTISGLQAEDEADYYCQTYDEHGFHIVFGGGTKLTVL

SEQ ID NO: 421 - protein, 120 aa, synthetic construct
  source 1..120: note = MF-Y_VH
QVQLVESGGGLVQPGGSLRLSCAASGFTFSNYGIHWVRQAPGKGLEWVSYIRSGSSDTYYADSVKGRFTISRDNSKNTLYLQMNSLRAEDTAVYYCARTAPAGHGVFANWGQGTLVTVSS

SEQ ID NO: 422 - protein, 110 aa, synthetic construct
  source 1..110: note = MF-Y_VL
DIVLTQPPSVSGAPGQRVTISCSGSSSNIGNYRVSWYQQLPGTAPKLLIYGNNKRPSGVPDRFSGSKSGTSASLAITGLQSEDEADYYCSTYTGLPFTTVFGGGTKLTVL

SEQ ID NO: 423 - protein, 122 aa, synthetic construct
  source 1..122: note = 3C10_VH
QVYLVESGGGVVQPGRSLRLSCAASGITFSIYGMHWVRQAPGKGLEWVAVIWYDGSHEYYADSVKGRFTISRDNSKNTLYLLMNSLRAEDTAVYYCARDGDYYDSGSPLDYWGQGTLVTVSS

SEQ ID NO: 424 - protein, 107 aa, synthetic construct
  source 1..107: note = 3C10_VL
EIVLTQSPATLSLSPGERATLSCRASQSVSSYLAWYQQKPGQAPRLLIYDASNRATGIPARFSGSGSGTDFTLTISSLEPEDFAVYYCQQRSNWPLTFGGGTKVEIK

SEQ ID NO: 425 - protein, 122 aa, synthetic construct
  source 1..122: note = 6A4_VH
QVHLVESGGGVVQPGRSLRLSCVASGITFRIYGMHWVRQAPGKGLEWVAVLWYDGSHEYYADSVKGRFTISRDNSKNTLYLQMNSLRAEDTAIYYCARDGDYYDSGSPLDYWGQGTLVTVSS

SEQ ID NO: 426 - protein, 107 aa, synthetic construct; identical to SEQ ID NO: 424
  source 1..107: note = 6A4_VL

SEQ ID NO: 427 - protein, 131 aa, synthetic construct; identical to SEQ ID NO: 313
  source 1..131: note = 7B1_VH

SEQ ID NO: 428 - protein, 108 aa, synthetic construct; identical to SEQ ID NO: 314
  source 1..108: note = 7B1_VL

SEQ ID NO: 429 - protein, 117 aa, synthetic construct
  source 1..117: note = 1C14-30_VH
EVQLQQSGADLVKPGASVKLSCIVSAFNIEDTYMHWVKQRPEQGLEWIGSIDPAHDNAKYDPKFQVKATITADTSSNTAYLQLSSLTSEDTAVYYCAKSDGFYFDSWGQGTTLTVSS

SEQ ID NO: 430 - protein, 107 aa, synthetic construct
  source 1..107: note = 1C14-30_VL
DIVMTQSQKFMSTSVGDRVSITCKASQNVRSAVAWYQQKPGQSPKALIYLASNRHTGVPDRFTGSGSGTDFTLTISNVQSEDLADYFCLQHWNYPLSVGGGTKLEIK

SEQ ID NO: 431 - protein, 122 aa, synthetic construct
  source 1..122: note = 11-25_VH
QVQLKESGPGLVAPSQSLSITCTVSGFSLTSYGVQWVRQPPGKGLEWLGVIWAGGSTKYNSALMSRLSISKDNSKSQVFLKMNSLQTDDTAMYYCARDDYYRRTSLYAMDYWGQGTSVTVSS

SEQ ID NO: 432 - protein, 112 aa, synthetic construct
  source 1..112: note = 11-25_VL
DVLMTQTPLSLPVSLGDQASISCRSSQSLVHSNGNTYLHWYLQKPGQSPKLLIYKVSNRFSGVPDRFSGSGSGTDFTLKISRVEAEDLGVYFCSQSTHVPYTFGGGTKLEIK

SEQ ID NO: 433 - protein, 119 aa, synthetic construct
  source 1..119: note = m912_VH
QVQLQESGPGLVKPSETLSLTCTVSGGSVSSGSYYWSWIRQPPGKGLEWIGYIYYSGSTNYNPSLKSRVTISVDTSKNQFSLKLSSVTAADTAVYYCAREGKNGAFDIWGQGTMVTVSS

SEQ ID NO: 434 - protein, 107 aa, synthetic construct
  source 1..107: note = m912_VL
DIQMTQSPSSLSASVGDRVTITCRASQSISSYLNWYQQKPGKAPKLLIYAASSLQSGVPSGFSGSGSGTDFTLTISSLQPEDFATYYCQQSYSTPLTFGGGTKVEIK

SEQ ID NO: 435 - protein, 119 aa, synthetic construct
  source 1..119: note = HN1_VH
QVQLVQSGAEVKRPGASVQVSCRASGYSINTYYMQWVRQAPGAGLEWMGVINPSGVTSYAQKFQGRVTLTNDTSTNTVYMQLNSLTSADTAVYYCARWALWGDFGMDVWGKGTLVTVSS

SEQ ID NO: 436 - protein, 107 aa, synthetic construct
  source 1..107: note = HN1_VL
DIQMTQSPSTLSASIGDRVTITCRASEGIYHWLAWYQQKPGKAPKLLIYKASSLASGAPSRFSGSGSGTDFTLTISSLQPDDFATYYCQQYSNYPLTFGGGTKLEIK

SEQ ID NO: 437 - protein, 120 aa, synthetic construct
  source 1..120: note = FF-TA (anetumab)_VH
QVELVQSGAEVKKPGESLKISCKGSGYSFTSYWIGWVRQAPGKGLEWMGIIDPGDSRTRYSPSFQGQVTISADKSISTAYLQWSSLKASDTAMYYCARGQLYGGTYMDGWGQGTLVTVSS

SEQ ID NO: 438 - protein, 111 aa, synthetic construct
  source 1..111: note = FF-TA (anetumab)_VL
DIALTQPASVSGSPGQSITISCTGTSSDIGGYNSVSWYQQHPGKAPKLMIYGVNNRPSGVSNRFSGSKSGNTASLTISGLQAEDEADYYCSSYDIESATPVFGGGTKLTVL

SEQ ID NO: 439 - protein, 119 aa, synthetic construct
  source 1..119: note = ADCP-XFT_VH
QVELVQSGAVKKPGESLKISCKGSGYSFTSYWIGWVRQAPGKGLEWMGIIDPGDSRTRYSPSFQGQVTISADKSISTAYLQWSSLKASDTAMYYCARGQLYGGTYMDGWGQGTLVTVSS

SEQ ID NO: 440 - protein, 111 aa, synthetic construct
  source 1..111: note = ADCP-XFT_VL
DIALTQPASVSGSPGQSITISCTGTSSDIGGYNSVSWYQQHPGKAPKLMIYGVNNRPSGVSNRFSGSKSGNTASLTISGLQAEDEADYYCSSYDIESATPVFGGGTKLEIK

SEQ ID NO: 441 - protein, 116 aa, synthetic construct
  source 1..116: note = Genentech 7D9_VH
EVQLVESGGGLVQPGGSLRLSCAASGYTFTTYWMHWVRQAPGKGLEWVGYIRPSTGYTEYNQKFKDRFTISADTSKNTAYLQMNSLRAEDTAVYYCARSRWLLDYWGQGTLVTVSS

SEQ ID NO: 442 - protein, 112 aa, synthetic construct
  source 1..112: note = Genentech 7D9_VL
DIQMTQSPSSLSASVGDRVTITCKSSQSVLYSSNQKNYLAWFQQKPGKAPKLLIYWASTRESGVPSRFSGSGSGTDFTLTISSLQPEDFATYFCHQYLSSYTFGQGTKVEIK

SEQ ID NO: 443 - protein, 117 aa, synthetic construct
  source 1..117: note = 22A10_VH
EVQLVESGGGLVQPGGSLRLSCAASGFTFSDYFMSWVRQAPGKGLEWVATISNGGTYTYYPDSVKGRFTISRDNSKNTLYLQMNSLRAEDTAVYYCARFDGYIFDYWGQGTLVTVSS

SEQ ID NO: 444 - protein, 107 aa, synthetic construct
  source 1..107: note = 22A10_VL
DIQMTQSPSSLSASVGDRVTITCRASQDISNYLNWYQQKPGKAPKLLIYYTSRLHSGVPSRFSGSGSGTDFTLTISSLQPEDFATYYCQQGNTLPYTFGQGTKVEIK

SEQ ID NO: 445 - protein, 119 aa, synthetic construct
  source 1..119: note = From WO 2015/051199 humanized SS1_VH
QVQLVQSGAEVKKPGASVKVSCKASGYSFTGYTMNWVRQAPGQGLEWMGLITPYNGASSYNQKFRGKATMTVDTSTSTVYMELSSLRSEDTAVYYCARGGYDGRGFDYWGQGTLVTVSS

SEQ ID NO: 446 - protein, 106 aa, synthetic construct
  source 1..106: note = From WO 2015/051199 humanized SS1_VL
DIQMTQSPSSLSASVGDRVTITCSASSSVSYMHWYQQKSGKAPKLLIYDTSKLASGVPSRFSGSGSGTDFTLTISSLQPEDFATYYCQQWSKHPLTFGQGTKLEIK

SEQ ID NO: 447 - protein, 119 aa, synthetic construct
  source 1..119: note = Amgen US 10100121 unknown1_VH
QVQLQESGPGLVKPSQTLSLTCTVSGGSINNNNYYWTWIRQHPGKGLEWIGYIYYSGSTFYNPSLKSRVTISVDTSKTQFSLKLSSVTAADTAVYYCAREDTMTGLDVWGQGTLVTVSS

SEQ ID NO: 448 - protein, 106 aa, synthetic construct
  source 1..106: note = Amgen US 10100121 unknown1_VL
DIQMTQSPSSLSASVGDRVTITCRASQSINNYLNWYQQKPGKAPTLLIYAASSLQSGVPSRFSGSRSGTDFTLTISSLQPEDFAAYFCQQTYSNPTFGQGTKVEVK

SEQ ID NO: 449 - protein, 119 aa, synthetic construct
  source 1..119: note = AB237_VH
QVQLQESGPGLVKPSQTLSLTCTVSGGSINNNNYYWTWIRQHPGKGLEWIGYIYYSGSTFYNPSLKSRVTISVDTSKTQFSLKLSSVTAADTAVYYCAREDTMTGLDVWGQGTTVTVSS

SEQ ID NO: 450 - protein, 106 aa, synthetic construct; identical to SEQ ID NO: 448
  source 1..106: note = AB237_VL

SEQ ID NO: 451 - protein, 123 aa, synthetic construct
  source 1..123: note = Eisai US 2016/369011 xi33o11_VH
QSVEESGGRLVTPGTPLTLTCTVSGISLSSDAISWVRQAPGKGLEYIGIINGGGNTYYASWAKGRFTISKTSTTVDLKITSPTTEDTATYFCARGIQHGGGNSDYYYYGMDLWGPGTLVTVSS

SEQ ID NO: 452 - protein, 112 aa, synthetic construct
  source 1..112: note = Eisai US 2016/369011 xi33o11_VL
EVLMTQTPSSVSAAVGDTVTIKCQASQSISSVLSWYQQKPGQPPKLLIYLASTLASGVPSRFSGSRSGTEFTLTISDLECDDAATYYCQTNYGTSSSNYGFAFGGGTEVVVK

SEQ ID NO: 453 - protein, 126 aa, synthetic construct
  source 1..126: note = Zu33011_VH
EVQLVESGGGLVQPGGSLRLSCAASGISLSSDAISWVRQAPGKGLEYIGIINGGGNTYYASWAKGRFTISRHNSKNTLYLQMNSLRAEDTAVYYCARGIQHGGGNSDYYYYGMDLWGQGTLVTVSS

SEQ ID NO: 454 - protein, 112 aa, synthetic construct
  source 1..112: note = Zu33011_VL
DIQMTQSPSSLSASVGDRVTITCQASQSISSVLSWYQQKPGKAPKLLIYLASTLASGVPSRFSGSGSGTDFTLTISSLQCEDFATYYCQTNYGTSSSNYGFAFGGGTKVEIK

SEQ ID NO: 455 - protein, 118 aa, synthetic construct
  source 1..118: note = xi324O5_VH
QSLEESGGRLVTPGTPLTLTCTASGFSLSNYAMTWVRQAPGKGLEYIGIISTGGITYYMDSAKGRFTISRTSTTVDLKMTSLTTEDTATYFCGRNAGGSYIFYYFDLWGQGTLVTVSS

SEQ ID NO: 456 - protein, 108 aa, synthetic construct
  source 1..108: note = xi324O5_VL
AFELTQTPSSVEAAVGGTVTIKCQASQSIYSYLAWYQQKPGQPPKLLIYSASTLASGVSSRFRGSGSGTEYTLTISDLECADAATYYCQTYYDIVTSTFGGGTEVVVK

SEQ ID NO: 457 - protein, 118 aa, synthetic construct; identical to SEQ ID NO: 455
  source 1..118: note = xi178F16_VH

SEQ ID NO: 458 - protein, 108 aa, synthetic construct
  source 1..108: note = xi178F16_VL
AFELTQTPSSVEAAVGGTVTIKCQASQSIYSYLAWYQQKPGQPPKLLIYSASTLASGVSSRFRGSGSGTEYILTISDLECADAATYYCQTYYDIVTSTFGGGTEVVVK

SEQ ID NO: 459 - protein, 113 aa, synthetic construct
  source 1..113: note = xi237N18_VH
QSLEESGGRLVAPGTPLTLTCTVSGFSLSSYHMSWVRQAPGEGLEWIGGITAMSRTYYASWAKGRFTISKTSTTVHLKITSPTTEDTATYFCAREPGFVSNIWGPGTLVTVSL

SEQ ID NO: 460 - protein, 108 aa, synthetic construct
  source 1..108: note = xi237N18_VL
AVVLTQTASPVSGVVGGTVTIKCQASQNIYSNLAWYQQKPGQRPKLLMYDASTLASGVPSRFKGSGSGTQFTLTISDLECADAATYYCQSISSVDNNVFGGGTEVVVK

SEQ ID NO: 461 - protein, 118 aa, synthetic construct
  source 1..118: note = xi383118_VH
QSVEESGGRLVTPGTPLTLTCTVSGFSLSSYAMGWVRQAPGEGLEWIGTISTGGITYYASWAKGRFTISKTSTTVDLKITSPTTEDTATYFCARVGSSGYLFYFFNLWGQGTLVTVSS

SEQ ID NO: 462 - protein, 108 aa, synthetic construct
  source 1..108: note = xi383118_VL
VFELTQTPSPVSAAVGGTVTIRCQASQNIKSYLAWYQQKPGQPPKLLIYEASILASGVSSRFKGSGSGTEFTLTISDLECADAATYYCQSYYAASSNAFGGGTEVVVK

SEQ ID NO: 463 - protein, 117 aa, synthetic construct
  source 1..117: note = Amgen US 2017/349668 MSLN_5_VH
QVQLVESGGGLVKPGGSLRLSCAASGFTFSDYYMTWIRQAPGKGLEWLSYISSSGSTIYYADSVKGRFTISRDNAKNSLFLQMNSLRAEDTAVYYCARDRNSHFDYWGQGTLVTVSS

SEQ ID NO: 464 - protein, 107 aa, synthetic construct
  source 1..107: note = Amgen US 2017/349668 MSLN_5_VL
DIQMTQSPSSVSASVGDRVTITCRASQGINTWLAWYQQKPGKAPKLLIYGASGLQSGVPSRFSGSGSGTDFTLTISSLQPEDFATYYCQQAKSFPRTFGQGTKVEIK

SEQ ID NO: 465 - protein, 115 aa, synthetic construct
  source 1..115: note = U Penn and Novartis US 2016/311917 MSLN5 (different from above)_VH
QVQLVQSGAEVEKPGASVKVSCKASGYTFTDYYMHWVRQAPGQGLEWMGWINPNSGGTNYAQKFQGRVTMTRDTSISTAYMELSRLRSDDTAVYYCASGWDFDYWGQGTLVTVSS

SEQ ID NO: 466 - protein, 106 aa, synthetic construct
  source 1..106: note = U Penn and Novartis US 2016/311917 MSLN5 (different from above)_VL
DIVMTQSPSSLSASVGDRVTITCRASQSIRYYLSWYQQKPGKAPKLLIYTASILQNGVPSRFSGSGSGTDFTLTISSLQPEDFATYYCLQTYTTPDFGPGTKVEIK

SEQ ID NO: 467 - protein, 119 aa, synthetic construct
  source 1..119: note = City of Hope WO 2016/187158 MORab-009(I83)_VH
EVQLQQSGGELEKPGASVKISCKASGYSFTGYTMNWVKQSHGKSLEWIGLITPYNGASSYNQKFRGKATLTVDKSSSTAYMDLLSLTSEDSAIYFCARGGYDGRGFDYWGSGTPVTVSS

SEQ ID NO: 468 - protein, 106 aa, synthetic construct
  source 1..106: note = City of Hope WO 2016/187158 MORab-009(I83)_VL
DIELTQSPIIMSASPGEKVTMTCSASSSVSYMHWYQQRTNGSPRRWIYDTSKLASGVPGRFSGSGSGNSYSLTISSVEAEDIADYYCQQWSKHPLTFGSGTKVEIK

SEQ ID NO: 469 - protein, 119 aa, synthetic construct; identical to SEQ ID NO: 467
  source 1..119: note = MORab-009(E83)_VH

SEQ ID NO: 470 - protein, 106 aa, synthetic construct
  source 1..106: note = MORab-009(E83)_VL
DIELTQSPIIMSASPGEKVTMTCSASSSVSYMHWYQQRTNGSPRRWIYDTSKLASGVPGRFSGSGSGNSYSLTISSVEAEDEADYYCQQWSKHPLTFGSGTKVEIK

SEQ ID NO: 471 - protein, 122 aa, synthetic construct
  source 1..122: note = USA HHS US 9409992 YP223_VH
QEQLEESGGDLVQPEGSLTLTCKASGLDFSSSYWICWVRQAPGKGLEWIGCRHTFTANTWSASWVNGRFTISRSTSLGTVDLKMTSLTAADTATYFCARDESNNDGWDFKLWGPGTLVTVSS

SEQ ID NO: 472 - protein, 109 aa, synthetic construct
  source 1..109: note = USA HHS US 9409992 YP223_VL
AYDMTQTPASVSAAVGGTVTIKCQASQSISNYLAWYQQKPGQPPKLLIYQASTLAPGVSSRFKGSGSGTEFTLTISGVECADAATYYCQQGYTSSNVENVFGGGTGVVV

SEQ ID NO: 473 - protein, 123 aa, synthetic construct
  source 1..123: note = YP218_VH
QQQLEESGGGLVKPEGSLTLTCKASGFDLGFYFYACWVRQAPGKGLEWIACIYTAGSGSTYYASWAKGRFTISKASSTTVTLQMTSLAAADTATYFCARSTANTRSTYYLNLWGPGTLVTVSS

SEQ ID NO: 474 - protein, 110 aa, synthetic construct
  source 1..110: note = YP218_VL
DVVMTQTPASVSEPVGGTVTIKCQASQRISSYLSWYQQKPGQRPKLLIFGASTLASGVPSRFKGSGSGTEYTLTISDLECADAATYYCQSYAYFDSNNWHAFGGGTEVVV

SEQ ID NO: 475 - protein, 119 aa, synthetic construct
  source 1..119: note = YP3_VH
QEQLVESGGGLVQPGASLTLTCTASGIDFSRYYMCWVRQAPGKGLEGIACIYIGGSGSTYYASWAKGRFTISKASSTTVTLQMTSLTAADTATYFCARGTNLNYIFRLWGPGTLVTVSS

SEQ ID NO: 476 - protein, 109 aa, synthetic construct
  source 1..109: note = YP3_VL
DVVMTQTPSPVSAAVGGTVTIKCQASQSINNGLAWYQQKPGQPPRLLIYSASNLESGVPSRFKGSGSGTEFTLTISDLECDDAATYYCQCIWDGNSYVNAFGGGTEVVV

SEQ ID NO: 477 - protein, 115 aa, synthetic construct
  source 1..115: note = YP187_VH
QSLEESGGDLVKPGASLTLTCKASGFDFSSNAMCWVRQAPGKGLEWIACIYVGDGNTYYASWAKGRFTISKTSSTTVTLQMTSLTAADTATYFCARGYASYGSDYYWDYFKLWGP

SEQ ID NO: 478 - protein, 109 aa, synthetic construct
  source 1..109: note = YP187_VL
AYDMTQTPASVSAAVGGTVTIKCQASQSISTALAWYQQKPGQPPKVLIYAASNLASGVSSRFKGSGSGTEFTLTISDLECADAATYYCQQAATIINVDNVFGGGTEVVV

SEQ ID NO: 479 - protein, 120 aa, synthetic construct
  source 1..120: note = YP158_VH
QSLEESGGDLVKPGASLTLTCTASGFSFSGDYYMCWVRQAPGKGLEWIACIGGGSNTATYYATWAKGRFTISKTSSTTVTLQMTSLTAADTATYFCARDLGFVDYALELWGPGTLVTVSS

SEQ ID NO: 480 - protein, 111 aa, synthetic construct
  source 1..111: note = YP158_VL
DIVMTQTPASVEVAVGGTVTIKCQASENMYNSLAWYQQKPGQPPKLLIYRASTLESGVPSRFKGSGSGTEYTLTISDLECADAATYYCQCTFYSHNNNYGGAFGGGTEVVV

SEQ ID NO: 481 - protein, 120 aa, synthetic construct
  source 1..120: note = Lentigen Tech WO 2018/045325 M1-4S_VH
EVQLVQSGGGLVQPGGSLRLSCAASGFTFDDYAMHWVRQAPGKGLEWVSGISWNSGSIGYADSVKGRFTISRDNAKNSLYLQMNSLRAEDTALYYCAKDLSSVAGPFNYWGQGTLVTVSS

SEQ ID NO: 482 - protein, 108 aa, synthetic construct
  source 1..108: note = Lentigen Tech WO 2018/045325 M1-4S_VL
SSELTQDPAVSVALGQTVRITCQGDSLRSYYASWYQQKPGQAPVLVIYGKNNRPSGIPDRFSGSSSGNTASLTITGAQAEDEADYYCNSRDSSGNHLVFGGGTQLTVL

SEQ ID NO: 483 - protein, 118 aa, synthetic construct
  source 1..118: note = Mab Designs WO 2018/060480 1H07_VH
EVQLQQSGTVLARPGASVKMSCKASGYSFTNYRMNWVKQRPGQGLEWIGGIYPGNRDTTYNQKFKDKAKLTAVTSANTAYMELSSLTNEDSAVYYCTRGVIGIYFDYWGQGTTLTVSS

SEQ ID NO: 484 - protein, 112 aa, synthetic construct
  source 1..112: note = Mab Designs WO 2018/060480 1H07_VL
LDIVMTQSPASLAVSLGQRATISCKASQSVDYDGDSYMNWYQQKPGQPPKLLIYAASNLESGIPARFSGSGSGTDFTLNIHPVEEEDAATYYCQQNNEAPLTFGAGTKLELK

SEQ ID NO: 485 - protein, 118 aa, synthetic construct
  source 1..118: note = 3C02_VH
QVQLQQSGTVLARPGASVKMSCKASGYSFTNYRMYWVKQRPGQGLEWIGAIYPGNSDTTYKQKFKGKAKLTAVTSASTAYMELSSLTNEDSAVYYCTRGIRGSYFDVWGAGTTVTVSS

SEQ ID NO: 486 - protein, 112 aa, synthetic construct
  source 1..112: note = 3C02_VL
LDIVMTQSPASLAVSLGQRATISCKASQSVDYDGDSYMNWYQQKPGQPPKLLIYAASNLESGIPARFSGSGSGTDFTLNIHPVEEEDAATYYCQQSNEDPYTFGGGTKLEIK

SEQ ID NO: 487 - protein, 122 aa, synthetic construct
  source 1..122: note = Abbvie US 2017/342169 HuAb17_VH
EVQLVQSGAEVKEPGASVKVSCKASGDTFNRYYVHWARQAPGQGLEWMGIINPSGVSTTYAQKFQGRVTMTRDTPTNTVYMELGSLRPEDTAVYFCAESRGSGYNYFAMDVWGQGTLVTVSS

SEQ ID NO: 488 - protein, 106 aa, synthetic construct
  source 1..106: note = Abbvie US 2017/342169 HuAb17_VL
SYELTQPPSVSVSPGQTADITCSGDKLGDKYASWYQQKPGQSPVLVIYQDNRRPSGIPERFSGSNSGNTATLTISGTQAMDEADYYCQAWDSDTYVFGPGTKVTVL

SEQ ID NO: 489 - protein, 122 aa, synthetic construct; identical to SEQ ID NO: 487
  source 1..122: note = HuAM1_VH

SEQ ID NO: 490 - protein, 106 aa, synthetic construct; identical to SEQ ID NO: 488
  source 1..106: note = HuAM1_VL

SEQ ID NO: 491 - protein, 122 aa, synthetic construct
  source 1..122: note = HuAM2_VH
EVQLVQSGAEVKKPGASVKVSCKASGDTFKRYYVQWVRQAPGQGLEWMGIINPSGVSTTYAQKFQGRVTMTRDTSTSTVYMELSSLRSEDTAVYYCAESRGSGYNYFAMDVWGQGTLVTVSS

SEQ ID NO: 492 - protein, 106 aa, synthetic construct
  source 1..106: note = HuAM2_VL
SYELTQPPSVSVSPGQTASITCSGDKLGDKYASWYQQKPGQSPVLVIYQDNRRPSGIPERFSGSNSGNTATLTISGTQAMDEADYYCQAWDSDTYVFGTGTKVTVL

SEQ ID NO: 493 - protein, 122 aa, synthetic construct
  source 1..122: note = HuAM3_VH
EVQLVQSGAEVKKPGASVKVSCKASGYTFKRYYVHWVRQAPGQGLEWMGIINPSGVSTTYAQKFQGRVTMTRDTSTSTVYMELSSLRSEDTAVYYCAESRGSGYNYFAMDVWGQGTLVTVSS

SEQ ID NO: 494 - protein, 106 aa, synthetic construct; identical to SEQ ID NO: 492
  source 1..106: note = HuAM3_VL

SEQ ID NO: 495 - protein, 122 aa, synthetic construct
  source 1..122: note = HuAM4_VH
EVQLVQSGAEVKKPGASVKVSCKASGDTFKRYYVHWVRQAPGQGLEWMGIINPSGVSTTYAQKFQGRVTMTRDTSTSTVYMELSSLRSEDTAVYYCAESRGSGYNYFAMDVWGQGTLVTVSS

SEQ ID NO: 496 - protein, 106 aa, synthetic construct; identical to SEQ ID NO: 492
  source 1..106: note = HuAM4_VL

SEQ ID NO: 497 - protein, 122 aa, synthetic construct
  source 1..122: note = HuAM5_VH
EVQLVQSGAEVKKPGASVKVSCKASGDTFNRYYVHWVRQAPGQGLEWMGIINPSGVSTTYAQKFQGRVTMTRDTSTSTVYMELSSLRSEDTAVYYCAESRIPGYNNFAMDVWGQGTLVTVSS

SEQ ID NO: 498 - protein, 106 aa, synthetic construct; identical to SEQ ID NO: 492
  source 1..106: note = HuAM5_VL

SEQ ID NO: 499 - protein, 122 aa, synthetic construct
  source 1..122: note = HuAM6_VH
EVQLVQSGAEVKKPGASVKVSCKASGDTFNRYYVHWVRQAPGQGLEWMGIINPSGVSTTYAQKFQGRVTMTRDTSTSTVYMELSSLRSEDTAVYYCAEVRGSGYNYFAMDVWGQGTLVTVSS

SEQ ID NO: 500 - protein, 106 aa, synthetic construct; identical to SEQ ID NO: 492
  source 1..106: note = HuAM6_VL

SEQ ID NO: 501 - protein, 122 aa, synthetic construct
  source 1..122: note = HuAM7_VH
EVQLVQSGAEVKKPGASVKVSCKASGDTFNRYYVHWVRQAPGQGLEWMGIINPSGVSTTYAQKFQGRVTMTRDTSTSTVYMELSSLRSEDTAVYYCAESRVPGYNNFAMDVWGQGTLVTVSS

SEQ ID NO: 502 - protein, 106 aa, synthetic construct; identical to SEQ ID NO: 492
  source 1..106: note = HuAM7_VL

SEQ ID NO: 503 - protein, 122 aa, synthetic construct
  source 1..122: note = HuAM8_VH
EVQLVQSGAEVKKPGASVKVSCKASGDTFNRYYVHWVRQAPGQGLEWMGIINPSGVSTTYAQKFQGRVTMTRDTSTSTVYMELSSLRSEDTAVYYCAEVRGSGYNYFGMDVWGQGTLVTVSS

SEQ ID NO: 504 - protein, 106 aa, synthetic construct; identical to SEQ ID NO: 492
  source 1..106: note = HuAM8_VL

SEQ ID NO: 505 - protein, 122 aa, synthetic construct
  source 1..122: note = HuAM9_VH
EVQLVQSGAEVKKPGASVKVSCKASGDTFNRYYVHWVRQAPGQGLEWMGIINPSGVSTTYAQKFQGRVTMTRDTSTSTVYMELSSLRSEDTAVYYCAESRGSGYNYFAMDVWGQGTLVTVSS

SEQ ID NO: 506 - protein, 106 aa, synthetic construct
  source 1..106: note = HuAM9_VL
SYELTQPPSVSVSPGQTASITCSGDNLGYKYVSWYQQKPGQSPVLVIYQDHRRPSGIPERFSGSNSGNTATLTISGTQAMDEADYYCQAWDTDTYVFGTGTKVTVL

SEQ ID NO: 507 - protein, 122 aa, synthetic construct
  source 1..122: note = HuAM10_VH
EVQLVQSGAEVKKPGASVKVSCKASGDTFNRYYVQWVRQAPGQGLEWMGIINPSGVSTTYAQKFQGRVTMTRDTSTSTVYMELSSLRSEDTAVYYCAETRGSGYNYFGMDVWGQGTLVTVSS

SEQ ID NO: 508 - protein, 106 aa, synthetic construct; identical to SEQ ID NO: 492
  source 1..106: note = HuAM10_VL

SEQ ID NO: 509 - protein, 122 aa, synthetic construct
  source 1..122: note = HuAM11_VH
EVQLVQSGAEVKKPGASVKVSCKASGDTFKRYYMHWVRQAPGQGLEWMGIINPSGVSTTYAQKFQGRVTMTRDTSTSTVYMELSSLRSEDTAVYYCAEVRGSGFNYFGMDVWGQGTLVTVSS

SEQ ID NO: 510 - protein, 106 aa, synthetic construct
  source 1..106: note = HuAM11_VL
SYELTQPPSVSVSPGQTASITCSGDKLGDKYASWYQQKPGQSPVLVIYQDNRRPSGIPERFSGSNSGNTATLTISGTQAMDEADYYCQVWDSDTYVFGTGTKVTVL

SEQ ID NO: 511 - protein, 122 aa, synthetic construct
  source 1..122: note = HuAM12_VH
EVQLVQSGAEVKKPGASVKVSCKASGDTFHRYYVHWVRQAPGQGLEWMGIINPSGVSTTYAQKFQGRVTMTRDTSTSTVYMELSSLRSEDTAVYYCAEVRGSGFNYFGMDVWGQGTLVTVSS

SEQ ID NO: 512 - protein, 106 aa, synthetic construct; identical to SEQ ID NO: 492
  source 1..106: note = HuAM12_VL

SEQ ID NO: 513 - protein, 122 aa, synthetic construct
  source 1..122: note = HuAM13_VH
EVQLVQSGAEVKKPGASVKVSCKASGDTFNRYYVQWVRQAPGQGLEWMGIINPSGVSTTYAQKFQGRVTMTRDTSTSTVYMELSSLRSEDTAVYYCAETRGSGFNYFGMDVWGQGTLVTVSS

SEQ ID NO: 514 - protein, 106 aa, synthetic construct; identical to SEQ ID NO: 510
  source 1..106: note = HuAM13_VL

SEQ ID NO: 515 - protein, 122 aa, synthetic construct; identical to SEQ ID NO: 509
  source 1..122: note = HuAM14_VH

SEQ ID NO: 516 - protein, 106 aa, synthetic construct; identical to SEQ ID NO: 492
  source 1..106: note = HuAM14_VL

SEQ ID NO: 517 - protein, 122 aa, synthetic construct
  source 1..122: note = HuAM15_VH
EVQLVQSGAEVKKPGASVKVSCKASGDTFKRYYVHWVRQAPGQGLEWMGIINPSGVSTTYAQKFQGRVTMTRDTSTSTVYMELSSLRSEDTAVYYCAEVRGSGFNYFGMDVWGQGTLVTVSS

SEQ ID NO: 518 - protein, 106 aa, synthetic construct; identical to SEQ ID NO: 492
  source 1..106: note = HuAM15_VL

SEQ ID NO: 519 - protein, 122 aa, synthetic construct; identical to SEQ ID NO: 513
  source 1..122: note = HuAM16_VH

SEQ ID NO: 520 - protein, 106 aa, synthetic construct; identical to SEQ ID NO: 492
  source 1..106: note = HuAM16_VL

SEQ ID NO: 521 - protein, 122 aa, synthetic construct
  source 1..122: note = HuAM17_VH
EVQLVQSGAEVKKPGASVKVSCKASGDTFNRYYVQWVRQAPGQGLEWMGIINPSGVSTTYAQKFQGRVTMTRDTSTSTVYMELSSLRSEDTAVYYCAESRVPGYNIFAMDVWGQGTLVTVSS

SEQ ID NO: 522 - protein, 106 aa, synthetic construct; identical to SEQ ID NO: 492
  source 1..106: note = HuAM17_VL

SEQ ID NO: 523 - protein, 122 aa, synthetic construct
  source 1..122: note = HuAM18_VH
EVQLVQSGAEVKKPGASVKVSCKASGDTFNRYYVHWVRQAPGQGLEWMGIINPSGVSTTYAQKFQGRVTMTRDTSTSTVYMELSSLRSEDTAVYYCAETRGSGYNYFGMDVWGQGTLVTVSS

SEQ ID NO: 524 - protein, 106 aa, synthetic construct; identical to SEQ ID NO: 492
  source 1..106: note = HuAM18_VL

SEQ ID NO: 525 - protein, 122 aa, synthetic construct
  source 1..122: note = HuAM19_VH
EVQLVQSGAEVKKPGASVKVSCKASGDTFKRYYAHWVRQAPGQGLEWMGIINPSGVSTTYAQKFQGRVTMTRDTSTSTVYMELSSLRSEDTAVYYCAESRLPGYNAFAMDVWGQGTLVTVSS

SEQ ID NO: 526 - protein, 106 aa, synthetic construct
  source 1..106: note = HuAM19_VL
SYELTQPPSVSVSPGQTASITCSGDMLGYQYGSWYQQKPGQSPVLVIYQDNRRPSGIPERFSGSNSGNTATLTISGTQAMDEADYYCQAWDGDAFVFGTGTKVTVL

SEQ ID NO: 527 - protein, 122 aa, synthetic construct
  source 1..122: note = HuAM21_VH
EVQLVQSGAEVKKPGASVKVSCKASGDTFNRYYVQWVRQAPGQGLEWMGIINPSGVSTTYAQKFQGRVTMTRDTSTSTVYMELSSLRSEDTAVYYCAETRGPGFNYFGMDVWGQGTLVTVSS

SEQ ID NO: 528 - protein, 106 aa, synthetic construct; identical to SEQ ID NO: 492
  source 1..106: note = HuAM21_VL

SEQ ID NO: 529 - protein, 122 aa, synthetic construct; identical to SEQ ID NO: 527
  source 1..122: note = MSLN76923_VH

SEQ ID NO: 530 - protein, 106 aa, synthetic construct; identical to SEQ ID NO: 492
  source 1..106: note = MSLN76923_VL

SEQ ID NO: 531 - protein, 123 aa, synthetic construct
  source 1..123: note = US 2018/208645 USA HHS and Lentigen MH1P_VH
QVQLQSGPGLVKPSRTLSLTCAISGDSVSSNSAAWNWIRQSPSRGLEWLGRTYYRSKWYNDYAVSVKSRITINPDTSKNQFSLQLNSVTPEDTAVYYCARGKGGKKGGAFDIWGQGTMVTVSS

SEQ ID NO: 532 - protein, 106 aa, synthetic construct
  source 1..106: note = US 2018/208645 USA HHS and Lentigen MH1P_VL
SSELTQDPAVSVALGQTVRITCQGDSLRSYYASWYQQKPGQAPVLVIYGKNNRPSGIPDRFSGSSSGNTASLTITGAQAEDEAEYYCSSSTRNHVFFGRGTKVTVL

SEQ ID NO: 533 - protein, 121 aa, synthetic construct
  source 1..121: note = MH2P_VH
EVQLVQSGGGLVQPGRSQRLSCAASGFTFDDYAMHWVRQAPGKGLEWVSGISWNSGSIGYADSVKGRFTISRDNAKNSLYLQMNSLRAEDTALYYCAKDISSSAGNAFDIWGQGTMVTVSS

SEQ ID NO: 534 - protein, 108 aa, synthetic construct
  source 1..108: note = MH2P_VL
SSELTQDPAVSVALGQTVRITCQGDRLRSYYASWYQQKPGQAPVLVIYGKNNRPSGIPDRFSGSDSGDTASLTITGAQAEDEADYYCHSRDSGGNHVVFGGGTQLTVL

SEQ ID NO: 535 - protein, 118 aa, synthetic construct
  source 1..118: note = MH6P_VH
QVQLVQSGAEVKKPGASVKVSCKASGYTFTGYYMHWVRQAPGQGLEWMGRINPNSGGTNYAQKFQGRVTMTRNTSISTAYMELSRLRSDDTAVYYCARSGYYYGLDVWGQGTTVTVSS

SEQ ID NO: 536 - protein, 110 aa, synthetic construct
  source 1..110: note = MH6P_VL
QSVLTQPPSASGTPGQRVTISCSGSRSNIGRNTVNWYQQLPGLAPKLIIQRSDQRPSGVPDRFSGSKSVTSASLAISGLRSEDEADYYCGTWDNSLSAYVFGTGTKLTVL

SEQ ID NO: 537 - protein, 123 aa, synthetic construct
  source 1..123: note = CAFA therapeutics US 2018/244796 P1A6E_VH
QVQLEQSGLGLVKPSQTLSLTCAISGDTVSSDSAAWNWIRQSPSRGLEWLGRTYYRSKWFNDYAVSVKGRITINSDTSKNQFSLQLNSVTPEDTAVYYCARSNSYYYYAMDVWGQGTLVTVSS

SEQ ID NO: 538 - protein, 115 aa, synthetic construct
  source 1..115: note = CAFA therapeutics US 2018/244796 P1A6E_VL
QAVLTQPSSLSASPGASASLTCTLRSGINVGIYRIYWYQQRPGSPPQILLTYKSDSDKYQGSGVPSRFSGSKDASANAGILLISGLQSEDEADYYCMIWHSGGWVFGGGTKVTVL

SEQ ID NO: 539 - protein, 124 aa, synthetic construct
  source 1..124: note = P3F2_VH
QMQLVQSGAEVKKPGASVKVSCKASGYTFTSYYMHWVRQAPGQGLEWMGIINPSGGSTSYAQKFQGRVTMTRDTSTSTVYMELSSLRSEDTAVYYCASSRSGTTVVNHDAFDIWGKGTTVTVSS

SEQ ID NO: 540 - protein, 107 aa, synthetic construct
  source 1..107: note = P3F2_VL
DIQLTQSPSSLSASVGDRVTITCRASQVISRALAWYQQTPGKPPKLLIYDASNLQSGVPSRFSGSGSGTDFTLTISRLQPEDFATYYCQQFNSYPLTFGGGTKLEIK

SEQ ID NO: 541 - protein, 120 aa, synthetic construct
  source 1..120: note = WO 2017/072366 NBE therapeutics MN clone 3-1_VH
QVQLQQSGAELVKPGASMKLSCKASGYTFTSYWMHWVRQAPGQGLEWIGAIHPNSDNTIYYQKFKSRVTLTVDKSISTAYMQLSSLTSEDTAVYYCAIIITPVVPKFDYWGQGTTVTVSS

SEQ ID NO: 542 - protein, 107 aa, synthetic construct
  source 1..107: note = WO 2017/072366 NBE therapeutics MN clone 3-1_VL
DIQMTQSPSFLSASVGDRVTITCRASHDVGTSLAWYQQKPGQAPKLLIYWASTLQTGVPSRFSGSGSGTEFTLTISSLQPEDFATYYCQQYSSYPLTFGPGTTVDMK

SEQ ID NO: 543 - protein, 120 aa, synthetic construct
  source 1..120: note = MN clone 5-2_VH
QVQLQQSGAELVKPGASLKLSCKASGYTFTSYWMHWVRQAPGQGLEWIGAIHPNSDNTIYYQKFKSRFTITVDKSTSTAYMQLSSLTSEDTAVYYCAIIITPVVPKFDYWGQGTTVTVSS

SEQ ID NO: 544 - protein, 107 aa, synthetic construct
  source 1..107: note = MN clone 5-2_VL
DIVMTQSSSFMSASVGDRVSITCKASHDVGTSLAWYQQKPGQSPKLLIYWASTRQTGVPDRFSGSGSGTDFTLTISSVQSEDVATYFCQQYSSYPLTFGQGTKLEIK

SEQ ID NO: 545 - protein, 120 aa, synthetic construct; identical to SEQ ID NO: 543
  source 1..120: note = MN-clone 5-3_VH

SEQ ID NO: 546 - protein, 107 aa, synthetic construct
  source 1..107: note = MN-clone 5-3_VL
DIVMTQSPDSLAVSLGERATITCKSSHDVGTSLAWYQQKPGQPPKLLIYWASTRESGVPDRFSGSGSGTDFTLTISSLQAEDVAVYYCQQYSSYPLTFGQGTKLEIK

SEQ ID NO: 547 - protein, 122 aa, synthetic construct
  source 1..122: note = Amgen US 10100121 AB1.1.2_VH
QVQLVESGGGVVQPGRSLRLSCAASGFTFSSYGMHWVRQAPGKGLEWVAAIWYDGSNKYYADSVKGRFTISRDNSKNMLYLQMNSLRAEDTAVYYCARDLSIFGVVILSDYWGQGTLVTVSS

SEQ ID NO: 548 - protein, 107 aa, synthetic construct
  source 1..107: note = Amgen US 10100121 AB1.1.2_VL
EIVLTQSPDFQSVTPKEKVTITCRASQYIGSNLHWYQQTPDQSPKLLIKYASQSFSGVPSRFSGSGSGTDFTLTINSLEAEDAATYYCHQSSSLPWTFGQGTKVEIK

SEQ ID NO: 549 - protein, 119 aa, synthetic construct
  source 1..119: note = AB1.33.1_VH
QVQLQESGPGLVKPSQTLSLTCTVSGGSISGDGHFWSWIRQHPGKGLEWIGYIYYSGSTYYNPSLKSRVTISVDTSKNQFSLKLSSVTAADTAVYYCARLRGGYKFDYWGQGTLVTVSS

SEQ ID NO: 550 - protein, 112 aa, synthetic construct
  source 1..112: note = AB1.33.1_VL
DIVMTQTPLSLSVAPGQPASISCQSSLSLQHSNGKTYLYWYLQKPGQPPQLLIYEVSNRFSGVPDRFSGSGSGTDFTLKISRVEAEDVGIYYCMQSKQLPCSFGQGTKLEIK

SEQ ID NO: 551 - protein, 119 aa, synthetic construct; identical to SEQ ID NO: 549
  source 1..119: note = AB1.11.1-y_VH

SEQ ID NO: 552 - protein, 112 aa, synthetic construct
  source 1..112: note = AB1.11.1-y_VL
DIVMTQTPLSLSVAPGQPASISCQSSLSLQHSNGKTYLYWYLQKPGQPPQLLIYEVSNRFSGVPDRFSGSGSGTDFTLKISRVEAEDVGIYYCMQSKQLPYSFGQGTKLEIK

SEQ ID NO: 553 - protein, 128 aa, synthetic construct
  source 1..128: note = AB1.68.1_VH
QVQLQESGPGLVKPSETLSLTCTVSGDSINNYYWSWIRQPAGKGLEWIGRIFTSGSTNYNPSLKSRVTMSIDTSKNQFSLKLSSVTAADTAVYYCAREGGHYGSSGYLYYYYFGMDVWGQGTTVTVSS

SEQ ID NO: 554 - protein, 107 aa, synthetic construct
  source 1..107: note = AB1.68.1_VL
EIVLTQSPGTLSLSPGERATLSCRASQTVSSSYLAWYQQKPGQAPRLLIYGASIRATGIPDRFSGSGSGTDFTLTISRLEPEDFAVYYCQQYGSSLTFGGGTKVEIK

SEQ ID NO: 555 - protein, 122 aa, synthetic construct; identical to SEQ ID NO: 547
  source 1..122: note = AB1.78.1_VH

SEQ ID NO: 556 - protein, 107 aa, synthetic construct
  source 1..107: note = AB1.78.1_VL
EIVLTQSPDFQSVTPKEKVTITCRASQSIGSSLHWYRQKPDQSPKLLIKYASQSFSGVPSRFSGGGSGTDFTLTINSLEAEDAATYYCHQSSSLPWTFGQGTKVEIK

SEQ ID NO: 557 - protein, 121 aa, synthetic construct
  source 1..121: note = AB1.119.1_VH
QVQLQESGPGLVKPSQTLSLTCTVSGGSISSGGYYWNWIRQHPGKGLEWIGYIYYSGSTYYNPSLRGRLIISVDTSKNQFSLRLSSVTAADTAVYYCARDGGDSYGRMDVWGQGTTVTVSA

SEQ ID NO: 558 - protein, 112 aa, synthetic construct
  source 1..112: note = AB1.119.1_VL
DIVMTQTPLSSPVTLGQPASISCRSSQSLVHSDRNTYLSWLQQRPGQPPRLLIYKISNRFSGVPDRFSGSGAGTDFTLKISRVEAEDVGVYYCMQATQFPLTFGGGTKVEIK

SEQ ID NO: 559 - protein, 125 aa, synthetic construct
  source 1..125: note = AB.2.69.2_VH
QVQLQQSGPGLVKPSQTLSLTCAISGDSVSSNSVAWNWIRQSPSRGLEWLGRTYYRSKWYNDYAVSVKSRITINPDTSKNQFSLQLNSVTPEDTAVYYCARGIFVVPAVPRFDYWGQGTLVTVSS

SEQ ID NO: 560 - protein, 112 aa, synthetic construct
  source 1..112: note = AB.2.69.2_VL
DIVMTQSPLSLSVTPGEPASISCRSSLSLLHSNGYNYLDWFLQKPGQSPQLLIYLGSNRASGVPDRFSGSGSDTDFTLKISRVEAEDVGVYYCMQGLHTPPSFGQGTKLEIK

SEQ ID NO: 561 - protein, 125 aa, synthetic construct; identical to SEQ ID NO: 559
  source 1..125: note = AB.2.69.2-s_VH

SEQ ID NO: 562 - protein, 105 aa, synthetic construct
  source 1..105: note = AB.2.69.2-s_VL
DIQMTQSPSSLSASVGDRVTITCQASQDISNYLNWYQQKPGKAPNLLIYAASSLETGVPSRFSGGGSGTDFAFTISSLQPEDIAPYYCQQYDNLPFGPGTKVDIK

SEQ ID NO: 563 - protein, 125 aa, synthetic construct; identical to SEQ ID NO: 559
  source 1..125: note = AB.2.69.2-cv_VH

SEQ ID NO: 564 - protein, 105 aa, synthetic construct
  source 1..105: note = AB.2.69.2-cv_VL
DIQMTQSPSSLSASVGDRVTITCQASQDISNYLNWYQQKPGKAPKLLIYAASSLETGVPSRFSGSGSGTDFTLTISSLQPEDFATYYCQQYDNLPFGQGTKVDIK

SEQ ID NO: 565 - protein, 116 aa, synthetic construct
  source 1..116: note = AB1.58_VH
QVQLQESGPGLVKPSETLSLTCTVSGGSIISHYWSWIRQPPGKGLEWIGYIYYSGSTNYNPSLKSRVTISVDTSKNQFSLKLTSVTAADTAVYYCARDGWSAFDYWGQGTLVTVSS

SEQ ID NO: 566 - protein, 107 aa, synthetic construct
  source 1..107: note = AB1.58_VL
DIQMTQSPSSLSASVGDRVTITCRASQGIRNALGWYQQKPGKAPKRLIYAASSLQSGVPSRFSGSGSGTEFTLTISSLQPEDFATYYCLQHNSYPRTFGQGTKVEIR

SEQ ID NO: 567 - protein, 116 aa, synthetic construct
  source 1..116: note = AB1.51_VH
QVQLQESGPGLVKPSETLSLTCTVSGGSISSYYWSWIRQPPGKGLEWIGYIYYSGSTNYNPSLKSRVTISVDTSKNQFSLKLSSVTAADTAVYYCARVDYKAFDIWGQGTMVTVSS

SEQ ID NO: 568 - protein, 107 aa, synthetic construct
  source 1..107: note = AB1.51_VL
DIQMTQSPSSLSASVGDRVTITCRASQGIRNDLHWYQQKPGKAPKRLIYAASSLQSGVPSRFSGSGSGTEFTLTISSLQPEDFATYYCLQHYSYPWTFGQGTKVEIK

SEQ ID NO: 569 - protein, 116 aa, synthetic construct
  source 1..116: note = O25_VH
EVQLLESGGGLVQPGGSLRLSCAASGFTFSSYAMSWVRQAPGKGLEWVSAISGSGGSTYYADSVKGRFTISRDNSKNTLYLQMNSLRAEDTAVYYCAKSYGAFDYWGQGTLVTVSS

SEQ ID NO: 570 - protein, 118 aa, synthetic construct
  source 1..118: note = O25_VL
QPVLTQPASLSASPGASASLTCTLHSGISVKDYRIYWYQQKPGRPPQYLLRYKSNSDMQQGSGVPSRFSGSKDASANAGILLISGLQSEDEADYYCMIWHHGHGTSLVFGGGTKLTVL

SEQ ID NO: 571 - protein, 116 aa, synthetic construct; identical to SEQ ID NO: 569
  source 1..116: note = O30_VH

SEQ ID NO: 572 - protein, 123 aa, synthetic construct
  source 1..123: note = O30_VL
QSVLTQPPSASGTPGQRVTISCSGSSSNIAHGPVNWYQQLPGTAPKLLIYATNHRPSGVPDRFSGSKSGTTASLTISGLQSEDEADYYCAAYDLTGWFAYAVFGGGTKLTVLGQPKAAPSVTL

SEQ ID NO: 573 - protein, 116 aa, synthetic construct; identical to SEQ ID NO: 569
  source 1..116: note = O32_VH

SEQ ID NO: 574 - protein, 121 aa, synthetic construct
  source 1..121: note = O32_VL
SYVLTQPPSVSVAPGKTARITCGGNKIGHRAVHWYQQKPGQAPVLVIYYTYDRPSGIPERFSGSNSGNTATLTISRVEAGDEADYYCQVWDASRRDANVVFGGGTKLTVLGQPKAAPSVTL

SEQ ID NO: 575 - protein, 116 aa, synthetic construct; identical to SEQ ID NO: 569
  source 1..116: note = O35_VH

SEQ ID NO: 576 - protein, 118 aa, synthetic construct
  source 1..118: note = O35_VL
QPVLTQPVSLSASPGASVSLTCTLRSDIRVRDYRIFWYQQKPGSPPQYLLRYKTDSDKQQGSGVPSRFSGSKDASANAGILLISGLQSEDEADYYCMIWHRTTGTSLVFGGGTKLTVL

SEQ ID NO: 577 - protein, 116 aa, synthetic construct; identical to SEQ ID NO: 569
  source 1..116: note = O37_VH

SEQ ID NO: 578 - protein, 119 aa, synthetic construct
  source 1..119: note = O37_VL
QPVLTQPASLSASPGASASLTCTLRSGINVKDYRIFWYQQKPGSPPQYLLRYKSESDKQQGSGVPSRFSGSKDASANAGILLISGLQSEDEADYYCMIWHKDREGHAFVFGGGTKLTVL

SEQ ID NO: 579 - protein, 116 aa, synthetic construct; identical to SEQ ID NO: 569
  source 1..116: note = O38_VH

SEQ ID NO: 580 - protein, 119 aa, synthetic construct
  source 1..119: note = O38_VL
QPVLTQPASLSASPGASASLTCTLRSGINVRDYRIFWYQQKPGSPPQYLLRYKSASDKQQGSGVPSRFSGSKDASANAGILLISGLQSEDEADYYCMIWHHDSEGHAFVFGGGTKLTVL

SEQ ID NO: 581 - protein, 116 aa, synthetic construct; identical to SEQ ID NO: 569
  source 1..116: note = O41_VH

SEQ ID NO: 582 - protein, 120 aa, synthetic construct
  source 1..120: note = O41_VL
SYVLTQPPSVSVAPGKTARITCGGNKIGHRAVHWYQQKPGQAPVLVIYYTYERPSGIPERFSGSNSGNTATLTISRVEAGDEADYYCQVWDWYSEGGVVFGGGTKLTVLGQPKAAPSVTL

SEQ ID NO: 583 - protein, 115 aa, synthetic construct
  source 1..115: note = WO 2018/213612 USA HHS 2B4_VH
EVQLQQSGPELVKPGASVKISCKASGYPFTGHYMHWVKQGHVKSLEWIGRINPYTGAINYNQNFKDKASLSVEKSSSTAYMGLHSLTSEDSAVYYCVRDLGGGYWGQGTTLTVSS

SEQ ID NO: 584 - protein, 109 aa, synthetic construct
  source 1..109: note = WO 2018/213612 USA HHS 2B4_VL
QAVVTQESALTTSPGETVTLTCRSSTGAVTTSNYANWVQEKPDHLFTGLIAGTNNRAPGVPARFSGSLIGDKAALTITGAQPEDEAIFFCALWYSSHWVFGGGTKLTVL

SEQ ID NO: 585 - protein, 115 aa, synthetic construct
  source 1..115: note = 7B5_VH
EVQLQQSGPELVKPGTSVKISCKASGYPFTGHYMHWVKQGHVKSLEWIGRINPYTGAINYNQNFKDKASLTVEKSSSTAYMGLHSLTSEDSAVYYCVRDLGGGYWGQGTTLTVSS

SEQ ID NO: 586 - protein, 109 aa, synthetic construct
  source 1..109: note = 7B5_VL
QAVVTQESALTTSPGETVTLTCRSSTGAVTTSNYANWVQEKPDHLFTGLIAGTNNRAPGVPARFSGSLIGDKAALTITGAQPEDEAMFFCALWFGSHWVFGGGTKLTVL

SEQ ID NO: 587 - protein, 114 aa, synthetic construct
  source 1..114: note = 15B6_VH
EVQLQQSGPVLVKPGASVKISCKASGYSFTGYYMHWVRQSLVKRLEWIGRINPYTGVPSYKHNFKDKASLTVDKSSSTAYMELHSLTSEDSAVYYCARELGGYWGQGTTLTVSS

SEQ ID NO: 588 - protein, 109 aa, synthetic construct
  source 1..109: note = 15B6_VL
QAVVTQESALTTSPGETVTLTCRSSTGAVTTGNYPNWVQEKPDHLFTGLIAGTNNRAPGVPARFSGSLIGDKAALTITGAQTEDEAIYFCALWFSSHWVFGGGTKLTVL

SEQ ID NO: 589 - protein, 119 aa, synthetic construct
  source 1..119: note = Mogam Institute (US 2018/346588 MI323)_VH
EVQLQQSGPELVKPGTSVKISCKASGYSFTSYFIQWVKQRPGQGLEWIGWIFPGSGNTKYNEMFKGKATLAADTSSSTAYMQLSSLTSEDSAVYFCARSGGYQYYFDYWGQGTSVTVSS

SEQ ID NO: 590 - protein, 107 aa, synthetic construct
  source 1..107: note = Mogam Institute (US 2018/346588 MI323)_VL
DIVMTQSHKFMSTSVGDRVSITCKASQDVSTAVAWYQQKPGQSPKLLIYSASYRYPGVPDRFTGSGSGTDFTFTISSVQAEDLALYYCQQHYSTPWTFGGGTKLEIK

SEQ ID NO: 591 - protein, 118 aa, synthetic construct
  source 1..118: note = MI329_VH
EVMLVESGGDLVKPGGSLKLSCAASGFTFSSYAMSWVRRTPEKRLEWVATINSDGSYTFYPDSVKGRFTISRDNAKNTLYLQMNSLRSEDTAMYYCARWGENWYFDVWGAGTTVTVSS

SEQ ID NO: 592 - protein, 112 aa, synthetic construct
  source 1..112: note = MI329_VL
DVVMTQTPLSLPVSLGDQASISCRSSQSLVHSNGNTYLHWYLQKPGQSPKLLIYKVSNRFSGVPDRFSGSGSGTDFTLKISRVEAEDLGIYFCSQSTHFPRTFGGATKLELK

SEQ ID NO: 593 - protein, 122 aa, synthetic construct
  source 1..122: note = MI403_VH
EVQVVESGGGLVKPGGSLKLSCAASGFAFSSYDMSWVRQTPEKRLEWVAYISSGGGSTYYPDTVKGRFTISRDNAKNTLYLQMNSLKSEDTAMYYCARQGTAVKNYWYFDVWGAGTSVTVSS

SEQ ID NO: 594 - protein, 111 aa, synthetic construct
  source 1..111: note = MI403_VL
DIVMTQSPASLAVSLGQRATISCRASQSVSTSSSSYVHWYQQRPGQPPKLLIKYASNLESGVPARFSGSGSGTDFTLNIHPVEEEDTGTYYCQHSWEIPFTFGSGTKLEIK

SEQ ID NO: 595 - protein, 122 aa, synthetic construct
  source 1..122: note = MI407_VH
EVKLVESGGGLVKPGGSLKLSCAASGFPFSNYDMSWVRQTPEKRLEWVAYISSGGGNTYYPDTVKGRFTISRDNAKNTLYLQMSSLKSEDTALYFCVRQGTSVESYWYFDVWGAGTTVTVSS

SEQ ID NO: 596 - protein, 111 aa, synthetic construct
  source 1..111: note = MI407_VL
DIVLTQSPASLAVSLGQRATISCRASQSVSTSSSSYIHWYQQKPGQPPKLLIKYASNLESGVPARFSGSGSGTDFTLNIHPVEEDDTATYYCQHSWEIPFTFGSGTELEIK

SEQ ID NO: 597 - protein, 116 aa, synthetic construct
  source 1..116: note = MS501_VH
EVQLLESGGGLVQPGGSLRLSCAASGFTFSNYAMSWVRQAPGKGLEWVSGIYPDSGSTYYADSVKGRFTISRDNSKNTLYLQMNSLRAEDTAVYYCARNIYTFDYWGQGTLVTVSS

SEQ ID NO: 598 - protein, 110 aa, synthetic construct
  source 1..110: note = MS501_VL
QSVLTQPPSASGTPGQRVTISCSGSSSNIGSNAVSWYQQLPGTAPKLLIYYNNQRPSGVPDRFSGSKSGTSASLAISGLRSEDEADYYCGSWDSSLSGYVFGGGTKLTVL

SEQ ID NO: 599 - protein, 116 aa, synthetic construct
  source 1..116: note = MS502_VH
EVQLLESGGGLVQPGGSLRLSCAASGFTFSNYAMSWVRQAPGKGLEWVSGIPPDSGSKYYADSVRGRFTVSRDNSKNTLYLQMNSLRAEDTAVYYCAKNMLSFDYWGQGTLVTVSS

SEQ ID NO: 600 - protein, 110 aa, synthetic construct
  source 1..110: note = MS502_VL
QSVLTQPPSASGTPGQRVTISCTGSSSNIGSNAVSWYQQLPGTAPKLLIYYNSKRPSGVPDRFSGSKSGTSASLAISGLRSEDEADYYCGSWDSSLNGYVFGGGTKVTVL

SEQ ID NO: 601 - protein, 116 aa, synthetic construct; identical to SEQ ID NO: 599
  source 1..116: note = MS502-1_1VH

SEQ ID NO: 602 - protein, 110 aa, synthetic construct
  source 1..110: note = MS502-1_1VL
QSVLTQPPSASGTPGQRVTISCICSSSNIGSNAVSWYQQLPGTAPKLLIYYNSKRPSGVPDRFSGSKSGTSASLAISGLRSEDEADYYCGSWDSSLNGYVFGGGTKLTVL

SEQ ID NO: 603 - protein, 116 aa, synthetic construct
  source 1..116: note = MS503_VH
EVQLLESGGGLVQPGGSLRLSCAASGFTFSNYAMSWVRQAPGKGLEWVSSIYPGDGSTYYADSVKGRFTISRDNSKNTLYLQMNSLRAEDTAVYYCAKNAFTFDYWGQGTLVTVSS

SEQ ID NO: 604 - protein, 110 aa, synthetic construct
  source 1..110: note = MS503_VL
QSVLTQPPSASGTPGQRVTISCSGSSSNIGSNAVSWYQQLPGTAPKLLIYYNSHRPSGVPDRFSGSKSGTSASLAISGLRSEDEADYYCGTWDSSLSGYVFGGGTKLTVL

SEQ ID NO: 605 - protein, 116 aa, synthetic construct
  source 1..116: note = MS504_VH
EVQLLESGGGLVQPGGSLRLSCAASGFTFSNYAMSWVRQAPGKGLEWVSSIYPNGSSKYYADSVKGRFTISRDNSKNTLYLQMNSLRAEDMAVYYCAKNLLTFDYWGQGTLVTVSS

SEQ ID NO: 606 - protein, 110 aa, synthetic construct
  source 1..110: note = MS504_VL
QSVLTQPPSASGPPGQRVTISCTGSSSNIGNNSVSWYQQLPGTAPKLLIYYDSHRPSGVPDRFSGSKSGTSASLAIGGLRSEDEADYYCGAWDDSLNAYVFGGGTKLTVL

SEQ ID NO: 607 - protein, 116 aa, synthetic construct
  source 1..116: note = MS505_VH
EVQLLESGGGLVQPGGSLRLSCAASGFTFSNYAMSWVRQAPGKGLEWVSAIYPDGSNKYYADSVKGRFTVSRDNSKNTLYLQMNSLRAEDTAVYYCARNAYTFDYWGQGTLVTVSS

SEQ ID NO: 608 - protein, 110 aa, synthetic construct
  source 1..110: note = MS505_VL
QSVLTQPPSASGTPGRRVTISCSGSSSNIGSNAVSWYQQLPGTAPKLLIYYNSQRPSGVPDRFSGSKSGTSASLAISGLRSEDEADYYCGSWDSSLNGYVFGGGTKLTVL

SEQ ID NO: 609 - protein, 116 aa, synthetic construct
  source 1..116: note = MS506_VH
EVQLLESGGGLVQPGGSLRLSCAASGFTFSNYAMSWVRQAPGKGLEWVSSIYPGSGSTYYADSVKGRFTISRDNSKNTLYLQMNSLRAEDTAVYYCARNLYTFDYWGQGTLVTVSS

SEQ ID NO: 610 - protein, 110 aa, synthetic construct
  source 1..110: note = MS506_VL
QSVLTQPPSASGTPGQRVTISCTGSSSNIGSNAVTWYQQLPGTAPKLLIYYDSHRPSGVPDRFSGSKSGTSASLAISGPRSEDEADYYCGAWDSSLSAYVFGGGTKLTVL

SEQ ID NO: 611 - protein, 116 aa, synthetic construct; identical to SEQ ID NO: 599
  source 1..116: note = C2G1_VH

SEQ ID NO: 612 - protein, 110 aa, synthetic construct
  source 1..110: note = C2G1_VL
QSVLTQPPSASGTPGQRVTISCTGSSSNIGPNAVSWYQQLPGTAPKLLIYYNSKRPSGVPDRFSGSKSGTSASLAISGLRSEDEADYYCGSWDSSLSGYVFGGGTKVTVL

SEQ ID NO: 613 - protein, 116 aa, synthetic construct; identical to SEQ ID NO: 599
  source 1..116: note = C2G4_VH

SEQ ID NO: 614 - protein, 110 aa, synthetic construct
  source 1..110: note = C2G4_VL
QSVLTQPPSASGTPGQRVTISCTGSSSNIGSNAVSWYQQLPGTAPKLLIYYNSKRPSGVPDRFSGSKSGTSASLAISGLRSEDEADYYCGSWDPSLNGYVFGGGTKVTVL

SEQ ID NO: 615 - protein, 116 aa, synthetic construct; identical to SEQ ID NO: 599
  source 1..116: note = C3C8_VH

SEQ ID NO: 616 - protein, 110 aa, synthetic construct
  source 1..110: note = C3C8_VL
QSVLTQPPSASGTPGQRVTISCTGSSSNIGPNAVSWYQQLPGTAPKLLIYYNSKRPSGVPDRFSGSKSGTSASLAISGLRSEDEADYYCGSWDSDLRGYVFGGGTKVTVL

SEQ ID NO: 617 - protein, 116 aa, synthetic construct
  source 1..116: note = 54_VH
EVQLLESGGGLVQPGGSLRLSCAASGFTFSNYAMSWVRQAPGKGLEWVSGIYPDSSSTYYADSVKGRFTISRDNSKNTLYLQMNSLRAEDTAVYYCARNIYTFDYWGQGTLVTVSS

SEQ ID NO: 618 - protein, 110 aa, synthetic construct; identical to SEQ ID NO: 600
  source 1..110: note = 54_VL

SEQ ID NO: 619 - protein, 116 aa, synthetic construct
  source 1..116: note = 56_VH
EVQLLESGGGLVQPGGSLRLSCAASGFTFSNYAMSWVRQAPGKGLEWVSGIPPDSASKYYADSVRGRFTVSRDNSKNTLYLQMNSLRAEDTAVYYCAKNMLSFDYWGQGTLVTVSS

SEQ ID NO: 620 - protein, 110 aa, synthetic construct; identical to SEQ ID NO: 600
  source 1..110: note = 56_VL

SEQ ID NO: 621 - protein, 116 aa, synthetic construct
  source 1..116: note = 2-30_VH
EVQLLESGGGLVQPGGSLRLSCAASGFTFSNYAMSWVRQAPGKGLEWVSGIPPDSNSKYYADSVRGRFTVSRDNSKNTLYLQMNSLRAEDTAVYYCAKNMRTFDYWGQGTLVTVSS

SEQ ID NO: 622 - protein, 110 aa, synthetic construct; identical to SEQ ID NO: 600
  source 1..110: note = 2-30_VL

SEQ ID NO: 623 - protein, 116 aa, synthetic construct
  source 1..116: note = 2-73_VH
EVQLLESGGGLVQPGGSLRLSCAASGFTFSNYAMSWVRQAPGKGLEWVSGIPPNSDSKYYADSVRGRFTVSRDNSKNTLYLQMNSLRAEDTAVYYCAKNMLSFDYWGQGTLVTVSS

SEQ ID NO: 624 - protein, 110 aa, synthetic construct; identical to SEQ ID NO: 600
  source 1..110: note = 2-73_VL

SEQ ID NO: 625 - protein, 116 aa, synthetic construct
  source 1..116: note = 2-78_VH
EVQLLESGGGLVQPGGSLRLSCAASGFTFSNYAMSWVRQAPGKGLEWVSGIPPDSGSKYYADSVRGRFTVSRDNSKNTLYLQMNSLRAEDTAVYYCAKNMFSFDYWGQGTLVTVSS

SEQ ID NO: 626 - protein, 110 aa, synthetic construct; identical to SEQ ID NO: 600
  source 1..110: note = 2-78_VL

SEQ ID NO: 627 - protein, 116 aa, synthetic construct; identical to SEQ ID NO: 619
  source 1..116: note = 56-C2G4_VH

SEQ ID NO: 628 - protein, 110 aa, synthetic construct; identical to SEQ ID NO: 614
  source 1..110: note = 56-C2G4_VL

SEQ ID NO: 629 - protein, 116 aa, synthetic construct; identical to SEQ ID NO: 621
  source 1..116: note = 2-30-C2G4_VH

SEQ ID NO: 630 - protein, 110 aa, synthetic construct; identical to SEQ ID NO: 614
  source 1..110: note = 2-30-C2G4_VL

SEQ ID NO: 631 - protein, 116 aa, synthetic construct; identical to SEQ ID NO: 623
  source 1..116: note = 2-73-C2G4_VH

SEQ ID NO: 632 - protein, 110 aa, synthetic construct; identical to SEQ ID NO: 614
  source 1..110: note = 2-73-C2G4_VL

SEQ ID NO: 633 - protein, 116 aa, synthetic construct; identical to SEQ ID NO: 625
  source 1..116: note = 2-78-C2G4_VH

SEQ ID NO: 634 - protein, 110 aa, synthetic construct; identical to SEQ ID NO: 614
  source 1..110: note = 2-78-C2G4_VL

SEQ ID NO: 635 - protein, 124 aa, synthetic construct
  source 1..124: note = M10MS-1_VH
QVQLQQSGPGLVKPSRTLSLTCAISGDSVSSNSAAWNWIRQSPSRGLEWLGRTYYRSKWYNDYAVSVKSRITINPDTSKNQFSLQLNSVTPEDTAVYYCARGKGGKKGGAFDIWGQGTMVTVSS

SEQ ID NO: 636 - protein, 106 aa, synthetic construct; identical to SEQ ID NO: 532
  source 1..106: note = M10MS-1_VL

SEQ ID NO: 637 - protein, 115 aa, synthetic construct; identical to SEQ ID NO: 316
  source 1..115: note = RG7882_VH

SEQ ID NO: 638 - protein, 113 aa, synthetic construct; identical to SEQ ID NO: 315
  source 1..113: note = RG7882_VL

SEQ ID NO: 639 - protein, 120 aa, synthetic construct
  source 1..120: note = MESO-C[MSLN]_H1.1 Variable Heavy
QVQLVQSGAEVKKPGASVKVSCKASGYTFTGYWMHWVRQAPGQGLEWMGMIHPNSDNTIYYEKFQGRVTMTVDKSISTAYMELSRLRSDDTAVYYCAIIITPVVPKFDYWGQGTLVTVSS

SEQ ID NO: 640 - protein, 120 aa, synthetic construct
  source 1..120: note = MESO-C[MSLN]_H1.2 Variable Heavy
QVQLVQSGAEVKKPGASVKVSCKASGYTFTSYYMHWVRQAPGQGLEWMGMIHPNSDNTIYYEKFQGRVTMTVDKSISTAYMELSRLRSDDTAVYYCAIIITPVVPKFDYWGQGTLVTVSS

SEQ ID NO: 641 - protein, 120 aa, synthetic construct
  source 1..120: note = MESO-C[MSLN]_H1.3 Variable Heavy
QVQLVQSGAEVKKPGASVKVSCKASGYTFTSYWMHWVRQAPGQGLEWMGWIHPNSDNTIYYEKFQGRVTMTVDKSISTAYMELSRLRSDDTAVYYCAIIITPVVPKFDYWGQGTLVTVSS

SEQ ID NO: 642 - protein, 120 aa, synthetic construct
  source 1..120: note = MESO-C[MSLN]_H1.4 Variable Heavy
QVQLVQSGAEVKKPGASVKVSCKASGYTFTSYWMHWVRQAPGQGLEWMGMINPNSDNTIYYEKFQGRVTMTVDKSISTAYMELSRLRSDDTAVYYCAIIITPVVPKFDYWGQGTLVTVSS

SEQ ID NO: 643 - protein, 120 aa, synthetic construct
  source 1..120: note = MESO-C[MSLN]_H1.5 Variable Heavy
QVQLVQSGAEVKKPGASVKVSCKASGYTFTSYWMHWVRQAPGQGLEWMGMIHPQSDNTIYYEKFQGRVTMTVDKSISTAYMELSRLRSDDTAVYYCAIIITPVVPKFDYWGQGTLVTVSS

SEQ ID NO: 644 - protein, 120 aa, synthetic construct
  source 1..120: note = MESO-C[MSLN]_H1.6 Variable Heavy
QVQLVQSGAEVKKPGASVKVSCKASGYTFTSYWMHWVRQAPGQGLEWMGMIHPNSGNTIYYEKFQGRVTMTVDKSISTAYMELSRLRSDDTAVYYCAIIITPVVPKFDYWGQGTLVTVSS

SEQ ID NO: 645 - protein, 120 aa, synthetic construct
  source 1..120: note = MESO-C[MSLN]_H1.7 Variable Heavy
QVQLVQSGAEVKKPGASVKVSCKASGYTFTSYWMHWVRQAPGQGLEWMGMIHPNSDNTIYYEKFQGRVTMTVDKSISTAYMELSRLRSDDTAVYYCARIITPVVPKFDYWGQGTLVTVSS

SEQ ID NO: 646 - protein, 120 aa, synthetic construct
  source 1..120: note = MESO-C[MSLN]_H1.8 Variable Heavy
QVQLVQSGAEVKKPGASVKVSCKASGYTFTSYWMHWVRQAPGQGLEWMGMIHPNSDNTIYYEKFQGRVTMTVDKSISTAYMELSRLRSDDTAVYYCAIIISPVVPKFDYWGQGTLVTVSS

SEQ ID NO: 647 - protein, 120 aa, synthetic construct
  source 1..120: note = MESO-C[MSLN]_H1.9 Variable Heavy
QVQLVQSGAEVKKPGASVKVSCKASGYTFTSYWMHWVRQAPGQGLEWMGMIHPNSDNTIYYEKFQGRVTMTVDKSISTAYMELSRLRSDDTAVYYCAIIITPVVPRFDYWGQGTLVTVSS

SEQ ID NO: 648 - protein, 120 aa, synthetic construct
  source 1..120: note = MESO-C[MSLN]_H1.12 Variable Heavy
QVQLVQSGAEVKKPGASVKVSCKASGYTFTSYWMHWVRQAPGQGLEWMGMIHPNSDNTIYYQKFQGRVTMTVDKSISTAYMELSRLRSDDTAVYYCAIIITPVVPKFDYWGQGTLVTVSS

SEQ ID NO: 649 - protein, 120 aa, synthetic construct
  source 1..120: note = MESO-C[MSLN]_H1.13 Variable Heavy
QVQLVQSGAEVKKPGASVKVSCKASGYTFTSYWMHWVRQAPGQGLEWMGMIHPNSDNTIYYYKFQGRVTMTVDKSISTAYMELSRLRSDDTAVYYCAIIITPVVPKFDYWGQGTLVTVSS

SEQ ID NO: 650 - protein, 107 aa, synthetic construct
  source 1..107: note = MESO-C[MSLN]_L1.1 Variable Light
DIVMTQSPDSLAVSLGERATINCKSSHDVGTSVAWYQQKPGQSPKLLIYWASTRHTGVPDRFTGSGSGTDFTLTISSLQAEDVAVYFCQQYSSYPLTFGAGTKLEIK

SEQ ID NO: 651 - protein, 107 aa, synthetic construct
  source 1..107: note = MESO-C[MSLN]_L1.2 Variable Light
DIVMTQSPDSLAVSLGERATINCKASQDVGTSVAWYQQKPGQSPKLLIYWASTRHTGVPDRFTGSGSGTDFTLTISSLQAEDVAVYFCQQYSSYPLTFGAGTKLEIK

SEQ ID NO: 652 - protein, 107 aa, synthetic construct
  source 1..107: note = MESO-C[MSLN]_L1.3 Variable Light
DIVMTQSPDSLAVSLGERATINCKASHSVGTSVAWYQQKPGQSPKLLIYWASTRHTGVPDRFTGSGSGTDFTLTISSLQAEDVAVYFCQQYSSYPLTFGAGTKLEIK

SEQ ID NO: 653 - protein, 107 aa, synthetic construct
  source 1..107: note = MESO-C[MSLN]_L1.4 Variable Light
DIVMTQSPDSLAVSLGERATINCKASHDVLTSVAWYQQKPGQSPKLLIYWASTRHTGVPDRFTGSGSGTDFTLTISSLQAEDVAVYFCQQYSSYPLTFGAGTKLEIK

SEQ ID NO: 654 - protein, 107 aa, synthetic construct
  source 1..107: note = MESO-C[MSLN]_L1.5 Variable Light
DIVMTQSPDSLAVSLGERATINCKASHDVGTYVAWYQQKPGQSPKLLIYWASTRHTGVPDRFTGSGSGTDFTLTISSLQAEDVAVYFCQQYSSYPLTFGAGTKLEIK

SEQ ID NO: 655 - protein, 107 aa, synthetic construct
  source 1..107: note = MESO-C[MSLN]_L1.6 Variable Light
DIVMTQSPDSLAVSLGERATINCKASHDVGTSLAWYQQKPGQSPKLLIYWASTRHTGVPDRFTGSGSGTDFTLTISSLQAEDVAVYFCQQYSSYPLTFGAGTKLEIK

SEQ ID NO: 656 - protein, 107 aa, synthetic construct
  source 1..107: note = MESO-C[MSLN]_L1.7 Variable Light
DIVMTQSPDSLAVSLGERATINCKASHDVGTSVAWYQQKPGQSPKLLIYWASTRETGVPDRFTGSGSGTDFTLTISSLQAEDVAVYFCQQYSSYPLTFGAGTKLEIK

SEQ ID NO: 657 - protein, 107 aa, synthetic construct
  source 1..107: note = MESO-C[MSLN]_L1.8 Variable Light
DIVMTQSPDSLAVSLGERATINCKASHDVGTSVAWYQQKPGQSPKLLIYWASTRHSGVPDRFTGSGSGTDFTLTISSLQAEDVAVYFCQQYSSYPLTFGAGTKLEIK

SEQ ID NO: 658 - protein, 107 aa, synthetic construct
  source 1..107: note = MESO-C[MSLN]_L1.9 Variable Light
DIVMTQSPDSLAVSLGERATINCKASHDVGTSVAWYQQKPGQSPKLLIYWASTRHTGVPDRFTGSGSGTDFTLTISSLQAEDVAVYFCQQYYSYPLTFGAGTKLEIK

SEQ ID NO: 659 - protein, 107 aa, synthetic construct
  source 1..107: note = MESO-C[MSLN]_L1.10 Variable Light
DIVMTQSPDSLAVSLGERATINCKASHDVGTSVAWYQQKPGQSPKLLIYWASTRHTGVPDRFTGSGSGTDFTLTISSLQAEDVAVYFCQQYSSTPLTFGAGTKLEIK

SEQ ID NO: 660 - protein, 107 aa, synthetic construct
  source 1..107: note = MESO-C[MSLN]_L1.13 Variable Light
DIVMTQSPDSLAVSLGERATINCKASHDVGQSVAWYQQKPGQSPKLLIYWASTRHTGVPDRFTGSGSGTDFTLTISSLQAEDVAVYFCQQYSSYPLTFGAGTKLEIK

SEQ ID NO: 661 - protein, 107 aa, synthetic construct
  source 1..107: note = MESO-C[MSLN]_L1.14 Variable Light
DIVMTQSPDSLAVSLGERATINCKASHDVGTSVAWYQQKPGQSPKLLIYWASTRHTGVPDRFTGSGSGTDFTLTISSLQAEDVAVYFCQQYSSFPLTFGAGTKLEIK

SEQ ID NO: 662 - protein, 107 aa, synthetic construct
  source 1..107: note = MESO-C[MSLN]_L1.15 Variable Light
DIVMTQSPDSLAVSLGERATINCKASHDVGTSVAWYQQKPGQSPKLLIYWASTRHTGVPDRFTGSGSGTDFTLTISSLQAEDVAVYFCQQYSSLPLTFGAGTKLEIK

SEQ ID NO: 663 - protein, 107 aa, synthetic construct
  source 1..107: note = MESO-C[MSLN]_L1.16 Variable Light
DIVMTQSPDSLAVSLGERATINCKASHDVGTSVAWYQQKPGQSPKLLIYWASTRHTGVPDRFTGSGSGTDFTLTISSLQAEDVAVYFCQQYSSVPLTFGAGTKLEIK

SEQ ID NO: 664 - protein, 107 aa, synthetic construct
  source 1..107: note = MESO-C[MSLN]_L1.17 Variable Light
DIVMTQSPDSLAVSLGERATINCKASHDVGTSVAWYQQKPGQSPKLLIYWASTRHTGVPDRFTGSGSGTDFTLTISSLQAEDVAVYFCQQYSSIPLTFGAGTKLEIK

SEQ ID NO: 665 - protein, 107 aa, synthetic construct
  source 1..107: note = MESO-C[MSLN]_L1.18 Variable Light
DIVMTQSPDSLAVSLGERATINCKASHDVGTSVAWYQQKPGQSPKLLIYWASTRHTGVPDRFTGSGSGTDFTLTISSLQAEDVAVYFCQQYSSHPLTFGAGTKLEIK

SEQ ID NO: 666 - protein, 107 aa, synthetic construct
  source 1..107: note = MESO-C[MSLN]_L1.19 Variable Light
DIVMTQSPDSLAVSLGERATINCKASHDVGTYVAWYQQKPGQSPKLLIYWASTRHTGVPDRFTGSGSGTDFTLTISSLQAEDVAVYFCQQYYSYPLTFGAGTKLEIK

SEQ ID NO: 667 - protein, 107 aa, synthetic construct
  source 1..107: note = MESO-C[MSLN]_L1.20 Variable Light
DIVMTQSPDSLAVSLGERATINCKASHDVGTSVAWYQQKPGQSPKLLIYWASTRHTGVPDRFTGSGSGTDFTLTISSLQAEDVAVYFCQQYYSFPLTFGAGTKLEIK

SEQ ID NO: 668 - protein, 107 aa, synthetic construct
  source 1..107: note = MESO-C[MSLN]_L1.21 Variable Light
DIVMTQSPDSLAVSLGERATINCKASHDVGTSVAWYQQKPGQSPKLLIYWASTRHTGVPDRFTGSGSGTDFTLTISSLQAEDVAVYFCQQYYSVPLTFGAGTKLEIK

SEQ ID NO: 669 - protein, 107 aa, synthetic construct
  source 1..107: note = MESO-C[MSLN]_L1.22 Variable Light
DIVMTQSPDSLAVSLGERATINCKASHDVGTSVAWYQQKPGQSPKLLIYWASTRHTGVPDRFTGSGSGTDFTLTISSLQAEDVAVYFCQQYYSIPLTFGAGTKLEIK

SEQ ID NO: 670 - protein, 120 aa, synthetic construct
  source 1..120: note = RS7[TROP2]_vh
VKLQESGPELKKPGETVKISCKASGYTFTNYGMNWVKQAPGKGLKWMGWINTYTGEPTYTDDFKGRFAFSLETSATTAYLQINNLKSEDMATYFCARGGFGSSYWYFDVWGQGTTVTVSS

SEQ ID NO: 671 - protein, 107 aa, synthetic construct
  source 1..107: note = RS7[TROP2]_vl
DIQLTQSHKFMSTSVGDRVSITCKASQDVSIAVAWYQQKPGQSPKLLIYSASYRYTGVPDRFTGSGSGTDFTFTISSVQAEDLAVYYCQQHYITPLTFGAGTKLELK

SEQ ID NO: 672 - protein, 121 aa, synthetic construct
  source 1..121: note = hRS7[TROP2]_vh
SVQLQQSGSELKKPGASVKVSCKASGYTFTNYGMNWVKQAPGQGLKWMGWINTYTGEPTYTDDFKGRFAFSLDTSVSTAYLQISSLKADDTAVYFCARGGFGSSYWYFDVWGQGSLVTVSS

SEQ ID NO: 673 - protein, 107 aa, synthetic construct
  source 1..107: note = hRS7[TROP2]_vl
DIQLTQSPSSLSASVGDRVSITCKASQDVSIAVAWYQQKPGKAPKLLIYSASYRYTGVPDRFSGSGSGTDFTLTISSLQPEDFAVYYCQQHYITPLTFGAGTKVEIK

SEQ ID NO: 674 - protein, 121 aa, synthetic construct
  source 1..121: note = hRS7v2[TROP2]_vh
QVQLQQSGSELKKPGASVKVSCKASGYTFTNYGMNWVKQAPGQGLKWMGWINTYTGEPTYTDDFKGRFAFSLDTSVSTAYLQISSLKADDTAVYFCARGGFGSSYWYFDVWGQGSLVTVSS

SEQ ID NO: 675 - protein, 107 aa, synthetic construct; identical to SEQ ID NO: 673
  source 1..107: note = hRS7v2[TROP2]_vl

SEQ ID NO: 676 - protein, 121 aa, synthetic construct
  source 1..121: note = AR47A6.4.2[TROP2]_vh
QIQLVQSGPELKKPGETVKISCKASGYTFTNYGMNWVKQAPGKGLKWMGWINTKTGEPTYAEEFKGRFAFSLETSASTAYLQINNLKKEDTATYFCGRGGYGSSYWYFDVWGAGTTVTVSS

SEQ ID NO: 677 - protein, 107 aa, synthetic construct
  source 1..107: note = AR47A6.4.2[TROP2]_vl
DIQMTQSPASLSASVGETVTITCRASENIYSYLAWYQQKQGKSPQLLVYNAKTLAEGVPSRFSGSGSGTQFSLKINSLRPEDFGSYYCQHHYGSPLTFGAGTKLELR

SEQ ID NO: 678 - protein, 121 aa, synthetic construct
  source 1..121: note = huAR476A6.4.2 HV2/KV3[TROP2]_vh
QIQLVQSGHEVKKPGASVKVSCKASGYTFTNYGMNWVRQAPGQGLEWMGWINTKTGEPTYAEEFKGRFVFSLETSASTAYLQISSLKAEDTAMYFCGRGGYGSSYWYFDVWGQGTTVTVSS

SEQ ID NO: 679 - protein, 107 aa, synthetic construct
  source 1..107: note = huAR476A6.4.2 HV2/KV3[TROP2]_vl
DIQMTQSPSSLSASVGDRVTITCKASQDVSIAVAWYQQKPGKAPKVLIYSASYRYTGVPDRFSGSGSGTDFTFTISSLQPEDIAVYYCQQHYITPLTFGGGTKVEIK

SEQ ID NO: 680 - protein, 121 aa, synthetic construct; identical to SEQ ID NO: 678
  source 1..121: note = huAR476A6.4.2 HV2/KV4[TROP2]_vh

SEQ ID NO: 681 - protein, 107 aa, synthetic construct
  source 1..107: note = huAR476A6.4.2 HV2/KV4[TROP2]_vl
DIQMTQSPSSLSASVGDRVTITCKASQDVSIAVAWYQQKPGKAPKVLIYSASYRYTGVPSRFSGSGSGTDFTFTISSLQPEDIAVYYCQQHYITPLTFGGGTKVEIK

SEQ ID NO: 682 - protein, 121 aa, synthetic construct
  source 1..121: note = huAR476A6.4.2 HV3/KV3[TROP2]_vh
QIQLVQSGHEVKKPGASVKVSCKASGYTFTNYGMNWVRQAPGQGLEWMGWINTKTGEPTYAEEFKGRFVFSLETSASTAYLQISSLKAEDMAMYFCGRGGYGSSYWYFDVWGQGTTVTVSS

SEQ ID NO: 683 - protein, 107 aa, synthetic construct; identical to SEQ ID NO: 679
  source 1..107: note = huAR476A6.4.2 HV3/KV3[TROP2]_vl

SEQ ID NO: 684 - protein, 121 aa, synthetic construct; identical to SEQ ID NO: 682
  source 1..121: note = huAR476A6.4.2 HV2/KV4[TROP2]_vh

SEQ ID NO: 685 - protein, 109 aa, synthetic construct
  source 1..109: note = 4F6[TROP2]_vh
DVQLEQFGAELVRPGTSVKMSCKAAGYTFTNYWIGWVKQRPGHGLEWIGDIYPGGGYTNYNEKFKGKATLTADTSSSTAYMQLSSLTFEDFAIYYCARGTGGGDYWGQG

SEQ ID NO: 686 - protein, 93 aa, synthetic construct
  source 1..93: note = 4F6[TROP2]_vl
IVITQSPASLSMAIGEKVSIRCITSTDIDDDMNWYQQKPGEPPKLLISEGNTLRPGVPSRFSSSGYGTDFVFTIENMLSEDVADYYCLQSDNL

SEQ ID NO: 687 - protein, 109 aa, synthetic construct; identical to SEQ ID NO: 685
  source 1..109: note = 2G10[TROP2]_vh

SEQ ID NO: 688 - protein, 93 aa, synthetic construct
  source 1..93: note = 2G10[TROP2]_vl
IVITQSPASLSMAIGEKVTIRCITSTDIDDDMNWYQQKPGEPPKLLISEGNTLRPGVPSRFSSSGYGTDFVFTIENMLSEDVADYYCLQSDNL

SEQ ID NO: 689 - protein, 109 aa, synthetic construct; identical to SEQ ID NO: 685
  source 1..109: note = 2EF[TROP2]_vh

SEQ ID NO: 690 - protein, 98 aa, synthetic construct
  source 1..98: note = 2EF[TROP2]_vl
DIVMTQSPASLAVSLGQRATISCRASQSVSTSSYSYMHWYQQKPGQPPKLLIKYASNLECGVPARFSGSGCGTDFTLNIHPVEEEDSATYYCQHSREI

SEQ ID NO: 691 - protein, 115 aa, synthetic construct
  source 1..115: note = K5-70[TROP2]_vh
QVQLQQPGAELVRPGASVKLSCKASGYTFTIYWINWVKQRPGQGLEWIGNIYPSDSYTNYNQKFKDKATLTVDKSSSTAYMQLSSPTSEDSAVYYCTRTSMADYWGQGTTLTVSS

SEQ ID NO: 692 - protein, 107 aa, synthetic construct
  source 1..107: note = K5-70[TROP2]_vl
DILLTQSPAILSVSPGERVSFSCRASQSIGTSIHWYQQRTNGSPRLLIKYASESISGIPSRFSGSGSGTDFTLSINSVESEDIADYYCQQSNSWPFTFGSGTKLEIK

SEQ ID NO: 693 - protein, 115 aa, synthetic construct
  source 1..115: note = K5-107[TROP2]_vh
QVQLQQPGSELVRPGASVKLSCKASGYTFTSYWMHWVKQRHGQGLEWIGNIYPGGGYTNYDEKFKSKGTLTVDTSSSTAYMHLSSLTSEDSAVYYCTRSSVFDYWGQGTTLTVSS

SEQ ID NO: 694 - protein, 107 aa, synthetic construct
  source 1..107: note = K5-107[TROP2]_vl
DILLTQSPAILSVSPGERVSFSCRASQNIGTSIHWFQQRTNGSPRLLIKYASESISGIPSRFSGSGSGTDFTLSINSVESEDIADYYCQQSNSWPFTFGSGTKLEIK

SEQ ID NO: 695 - protein, 113 aa, synthetic construct
  source 1..113: note = K5-116-2-1[TROP2]_vh
QVQLQQPGAELVRPGASVKLSCKASGYTFTSYWITWVKQRPGQGLEWIGNIYPSDSYTNYNQKFRDKATLTVDKSSSTAYMQLSSPTSEDSAVYYCSALFDYWGQGTTLTVSS

SEQ ID NO: 696 - protein, 107 aa, synthetic construct
  source 1..107: note = K5-116-2-1[TROP2]_vl
DILLTQSPAILSVSPGERVSFSCRASQSIGTSIHWYQQRTNGSPRLLIKYASESISGIPSRFSGSGSGTDFILSINSVESEDIADYYCQQSNSWPFTFGSGTKLEIK

SEQ ID NO: 697 - protein, 122 aa, synthetic construct
  source 1..122: note = T6-16[TROP2]_vh
EVQLQQSGPELVKPGASVKISCKASGYTFTDYNMHWVKQSHGKNLEWIGYIYPYNGGTGYNQRFKSRATMTVDKSSSTAYMELRSLTSDDSAVYYCAREDYGSSPSYAMDYWGQGTSVIVSS

SEQ ID NO: 698 - protein, 111 aa, synthetic construct
  source 1..111: note = T6-16[TROP2]_vl
DVVMTQTPLSLPVSLGDQASISCRSSQSLVHGNGNTYLHWYLQKPGQSPKLLIYKVSNRFSGVPDRFSGSGSGTDFTLKISRVEAEDLGVYFCSQTTHVPTFGSGTKLEIK

SEQ ID NO: 699 - protein, 116 aa, synthetic construct
  source 1..116: note = KM4097[TROP2]_vh
QVQLQQSGPELVRPGTSVRISCKASGYTFTIYWLGWVKQRPGHGLEWIGNIFPGSAYINYNEKFKGKATLTADTSSSTAYMQLSSLTSEDSAVYFCAREGSNSGYWGQGTTLTVSS

SEQ ID NO: 700 - protein, 113 aa, synthetic construct
  source 1..113: note = KM4097[TROP2]_vl
DIVMTQSPSSLSVSAGEKVTMTCKSSQSLLNSGNQQNYLAWYQQKPGQPPKLLIYGASTRESGVPDRFTGSGSGTDFTLTINSVQAEDLAVYYCQSDHIYPYTFGGGTKLEIK

SEQ ID NO: 701 - protein, 116 aa, synthetic construct
  source 1..116: note = HV0LV0[TROP2]_vh
QVQLVQSGAEVKKPGASVKVSCKASGYTFTIYWLGWVRQAPGQGLEWMGNIFPGSAYINYNEKFKGRVTITADTSTSTAYMELSSLRSEDTAVYYCAREGSNSGYWGQGTLVTVSS

SEQ ID NO: 702 - protein, 113 aa, synthetic construct
  source 1..113: note = HV0LV0[TROP2]_vl
DIVMTQSPDSLAVSLGERATINCKSSQSLLNSGNQQNYLAWYQQKPGQPPKLLIYGASTRESGVPDRFSGSGSGTDFTLTISSLQAEDVAVYYCQSDHIYPYTFGQGTKLEIK

SEQ ID NO: 703 - protein, 116 aa, synthetic construct
  source 1..116: note = HV3aLV0[TROP2]_vh
QVQLVQSGPEVKKPGASVKVSCKASGYTFTIYWLGWVRQAPGQGLEWMGNIFPGSAYINYNEKFKGKVTITADTSTSTAYMELSSLRSEDTAVYFCAREGSNSGYWGQGTLVTVSS

SEQ ID NO: 704 - protein, 113 aa, synthetic construct; identical to SEQ ID NO: 702
  source 1..113: note = HV3aLV0[TROP2]_vl

SEQ ID NO: 705 - protein, 116 aa, synthetic construct
  source 1..116: note = HV4LV0[TROP2]_vh
QVQLVQSGPEVKKPGASVKVSCKASGYTFTIYWLGWVKQAPGQGLEWIGNIFPGSAYINYNEKFKGRVTITADTSTSTAYMELSSLRSEDTAVYFCAREGSNSGYWGQGTLVTVSS

SEQ ID NO: 706 - protein, 113 aa, synthetic construct; identical to SEQ ID NO: 702
  source 1..113: note = HV4LV0[TROP2]_vl

SEQ ID NO: 707 - protein, 116 aa, synthetic construct
  source 1..116: note = HV5LV0[TROP2]_vh
QVQLVQSGAEVKKPGASVKVSCKASGYTFTIYWLGWVKQAPGQGLEWIGNIFPGSAYINYNEKFKGKATITADTSTSTAYMELSSLRSEDTAVYFCAREGSNSGYWGQGTLVTVSS

SEQ ID NO: 708 - protein, 113 aa, synthetic construct; identical to SEQ ID NO: 702
  source 1..113: note = HV5LV0[TROP2]_vl

SEQ ID NO: 709 - protein, 116 aa, synthetic construct
  source 1..116: note = HV10LV2[TROP2]_vh
QVQLVQSGPEVVKPGASVKISCKASGYTFTIYWLGWVKQAPGQGLEWIGNIFPGSAYINYNEKFKGKATLTADTSTSTAYMELSSLRSEDTAVYFCAREGSNSGYWGQGTLLTVSS

SEQ ID NO: 710 - protein, 113 aa, synthetic construct
  source 1..113: note = HV10LV2[TROP2]_vl
DIVMTQSPDSLAVSLGERVTINCKSSQSLLNSGNQQNYLAWYQQKPGQPPKLLIYGASTRESGVPDRFSGSGSGTDFTLTISSVQAEDVAVYYCQSDHIYPYTFGQGTKLEIK

SEQ ID NO: 711 - protein, 116 aa, synthetic construct; identical to SEQ ID NO: 709
  source 1..116: note = HV10LV4[TROP2]_vh

SEQ ID NO: 712 - protein, 113 aa, synthetic construct
  source 1..113: note = HV10LV4[TROP2]_vl
DIVMTQSPDSLAVSAGERVTMNCKSSQSLLNSGNQQNYLAWYQQKPGQPPKLLIYGASTRESGVPDRFSGSGSGTDFTLTISSVQAEDVAVYYCQSDHIYPYTFGQGTKLEIK

SEQ ID NO: 713 - protein, 119 aa, synthetic construct
  source 1..119: note = 7E6[TROP2]_vh
QVQLKESGPGLVAPSQSLSITCTVSGFSLTSYGVHWVRQPPGKGLEWLGVIWTGGSTDYNSALMSRLSINKDNSKSQVFLKMNSLQTDDTAMYYCARDGDYDRYTMDYWGQGTSVTVSS

SEQ ID NO: 714 - protein, 111 aa, synthetic construct
  source 1..111: note = 7E6[TROP2]_vl
DIVLTQSPASLAVSLGQRATISCRASKSVSTSGYSYMHWYQQKPGQPPKLLIYLASNLESGVPARFSGSGSGTDFTLNIHPVEEEDAATYYCQHSRELPYTFGGGTKLEIK

SEQ ID NO: 715 - protein, 119 aa, synthetic construct
  source 1..119: note = h7E6[TROP2]_vh
QVQLQESGPGLVKPSETLSLTCTVSGGSISSYGVHWIRQPPGKGLEWIGVIWTGGSTDYNSALMSRVTISVDTSKNQFSLKLSSVTAADTAVYYCARDGDYDRYTMDYWGQGTLVTVSS

SEQ ID NO: 716 - protein, 111 aa, synthetic construct
  source 1..111: note = h7E6[TROP2]_vl
DIVMTQSPDSLAVSLGERATINCRASKSVSTSGYSYMHWYQQKPGQPPKLLIYLASNLESGVPDRFSGSGSGTDFTLTISSLQAEDVAVYYCQHSRELPYTFGQGTKLEIK

SEQ ID NO: 717 - protein, 119 aa, synthetic construct
  source 1..119: note = h7E6_SVG[TROP2]_vh
QVQLQESGPGLVKPSETLSLTCTVSGGSISSYGVHWIRQPPGKGLEWIGVIWTSGVTDYNSALMGRVTISVDTSKNQFSLKLSSVTAADTAVYYCARDGDYDRYTMDYWGQGTLVTVSS

SEQ ID NO: 718 - protein, 111 aa, synthetic construct; identical to SEQ ID NO: 716
  source 1..111: note = h7E6_SVG[TROP2]_vl

SEQ ID NO: 719 - protein, 119 aa, synthetic construct; identical to SEQ ID NO: 717
  source 1..119: note = h7E6_SVGL[TROP2]_vh

SEQ ID NO: 720 - protein, 111 aa, synthetic construct
  source 1..111: note = h7E6_SVGL[TROP2]_vl
DIVMTQSPDSLAVSLGERATINCRASKSVSTSLYSYMHWYQQKPGQPPKLLIYLASNLESGVPDRFSGSGSGTDFTLTISSLQAEDVAVYYCQHSRELPYTFGQGTKLEIK

SEQ ID NO: 721 - protein, 119 aa, synthetic construct; identical to SEQ ID NO: 717
  source 1..119: note = h7E6_SVGN[TROP2]_vh

SEQ ID NO: 722 - protein, 111 aa, synthetic construct
  source 1..111: note = h7E6_SVGN[TROP2]_vl
DIVMTQSPDSLAVSLGERATINCRASKSVSTSNYSYMHWYQQKPGQPPKLLIYLASNLESGVPDRFSGSGSGTDFTLTISSLQAEDVAVYYCQHSRELPYTFGQGTKLEIK

SEQ ID NO: 723 - protein, 115 aa, synthetic construct
  source 1..115: note = 6G11[TROP2]_vh
QVQLQQPGAELVRPGASVKLSCKASGYTFTSYWINWVKQRPGHGLEWIGNIYPSDSYSNYNQKFKDKATLTVDKSSSTAYMQVSSPTSEDSAVYYCTYGSSFDYWGQGTTVTVSS

SEQ ID NO: 724 - protein, 107 aa, synthetic construct
  source 1..107: note = 6G11[TROP2]_vl
DILLTQSPAILSVSPGERVSFSCRASQTIGTSIHWYQQRTNGSPRLLIKYASESISGIPSRFSGSGSGTDFTLSINSVESEDIADYYCQQSNSWPFTFGSGTKLEIK

SEQ ID NO: 725 - protein, 115 aa, synthetic construct
  source 1..115: note = h6G11[TROP2]_vh
QVQLVQSGAEVKKPGASVKVSCKASGYTFTSYWINWVRQAPGQGLEWMGNIYPSDSYSNYNQKFKDRVTMTRDTSTSTVYMELSSLRSEDTAVYYCARGSSFDYWGQGTLVTVSS

SEQ ID NO: 726 - protein, 107 aa, synthetic construct
  source 1..107: note = h6G11[TROP2]_vl
EIVLTQSPATLSLSPGERATLSCRASQTIGTSIHWYQQKPGQAPRLLIYYASESISGIPARFSGSGSGTDFTLTISSLEPEDFAVYYCQQSNSWPFTFGQGTKLEIK

SEQ ID NO: 727 - protein, 115 aa, synthetic construct
  source 1..115: note = h6G11_FKG_SF[TROP2]_vh
QVQLVQSGAEVKKPGASVKVSCKASGYTFTSYWINWVRQAPGQGLEWMGNIFPSDSYSNYNKKFKDRVTMTRDTSTSTVYMELSSLRSEDTAVYYCARGSGFDYWGQGTLVTVSS

SEQ ID NO: 728 - protein, 107 aa, synthetic construct
  source 1..107: note = h6G11_FKG_SF[TROP2]_vl
EIVLTQSPATLSLSPGERATLSCRASQTIGTSIHWYQQKPGQAPRLLIYYASESISGIPARFSGSGSGTDFTLTISSLEPEDFAVYYCSQSFSWPFTFGQGTKLEIK

SEQ ID NO: 729 - protein, 115 aa, synthetic construct
  source 1..115: note = huK5-70[TROP2]_vh
QVQLVQSGAEVKKPGASVKVSCKASGYTFTIYWINWVRQAPGQRLEWIGNIYPSDSYTNYNQKFKDKATLTVDTSASTAYMELSSLRSEDTAVYYCTRTSMADYWGQGTLVTVSS

SEQ ID NO: 730 - protein, 107 aa, synthetic construct
  source 1..107: note = huK5-70[TROP2]_vl
EIVLTQSPATLSLSPGERATLSCRASQSIGTSIHWYQQKPGQAPRLLIKYASESISGIPARFSGSGSGTDFTLTISSLEPEDFAVYYCQQSNSWPFTFGQGTKVEIK

SEQ ID NO: 731 - protein, 115 aa, synthetic construct
  source 1..115: note = huK5-70-2[TROP2]_vh
QVQLVQSGAEVKKPGASVKVSCKASGYTFTIYWINWVRQAPGQGLEWIGNIYPSDSYTNYNQKFKDKATLTVDTSASTAYMELSSLRSEDTAVYYCTRTSMADYWGQGTLVTVSS

SEQ ID NO: 732 - protein, 107 aa, synthetic construct; identical to SEQ ID NO: 730
  source 1..107: note = huK5-70-2[TROP2]_vl

SEQ ID NO: 733 - protein, 122 aa, synthetic construct
  source 1..122: note = huT6-16-1[TROP2]_vh
QVQLVQSGAEVKKPGASVKVSCKASGYTFTDYNMHWVRQAPGQGLEWIGYIYPYNGGTGYNQRFKSRATMTVDKSTSTAYMELRSLRSDDTAVYYCAREDYGSSPSYAMDYWGQGTMVTVSS

SEQ ID NO: 734 - protein, 111 aa, synthetic construct
  source 1..111: note = huT6-16-1[TROP2]_vl
DIVMTQSPLSLPVTPGEPASISCRSSQSLVHGNGNTYLHWYLQKPGQSPQLLIYKVSNRFSGVPDRFSGSGSGTDFTLKISRVEAEDVGVYYCSQTTHVPTFGGGTKVEIK

SEQ ID NO: 735 - protein, 122 aa, synthetic construct
  source 1..122: note = huT6-16-2[TROP2]_vh
QVQLVQSGAEVKKPGASVKVSCKASGYTFTDYNMHWVRQAPGQGLEWIGYIYPYNGGTGYNQRFKSRATMTVDTSTSTAYMELRSLRSDDTAVYYCAREDYGSSPSYAMDYWGQGTMVTVSS

SEQ ID NO: 736 - protein, 111 aa, synthetic construct; identical to SEQ ID NO: 734
  source 1..111: note = huT6-16-2[TROP2]_vl

SEQ ID NO: 737 - protein, 121 aa, synthetic construct
  source 1..121: note = TINA[TROP2]_vh
QIQLVQSGPELKKPGETVRISCKASGYTFTTAGMQWVQKMPGKGLKWIGWINTHSGVPKYAEDFKGRFAFSLETSASTAYLQISNLKNEDTTTYFCARSGFGSSYWYFDVWGAGTAVTVSS

SEQ ID NO: 738 - protein, 107 aa, synthetic construct
  source 1..107: note = TINA[TROP2]_vl
DIVMTQSHKFMSTSVGDRVSITCKASQDVSTAVAWYQQKPGQSPKLLIYSASYRYTGVPDRFTGSGSGTAFTFTISSVQAEDLAVYYCQQHYITPLTFGAGTKLELK

SEQ ID NO: 739 - protein, 116 aa, synthetic construct
  source 1..116: note = 2EF[TROP2]_vh
QVQLQQSGAELVRPGTSVKMSCKAAGYTFTNYWIGWVKQRPGHGLEWIGDIYPGGGYTNYNEKFKGKATLTADTSSSTAYMQLSSLTSEDSAIYYCARGTGGGDYWGQGTLVTVSA

SEQ ID NO: 740 - protein, 111 aa, synthetic construct
  source 1..111: note = 2EF[TROP2]_vl
DIVLTQSPASLAVSLGQRATISCRASQSVSTSSYSYMHWYQQKPGQPPKLLIKYASNLESGVPARFSGSGSGTDFTLNIHPVEEEDTATYYCQHSWEIPYTFGGGTKLEIK

SEQ ID NO: 741 - protein, 119 aa, synthetic construct
  source 1..119: note = 2G10[TROP2]_vh
QGQMQQSGAELVKPGASVKLSCKTSGFTFSSSYISWLKQKPRQSLEWIAWIYAGTGGTSYNQKFTGKAQLTVDTSSSTAYMQLSSLTSEDSAIYYCARHNPRYYAMDYWGQGTSVTVSS

SEQ ID NO: 742 - protein, 107 aa, synthetic construct
  source 1..107: note = 2G10[TROP2]_vl
ETTVTQSPASLSMAIGEKVTIRCITSTDIDDDMNWYQQKPGEPPKLLISEGNTLRPGVPSRFSSSGYGTDFVFTIENMLSEDVADYYCLQSDNLPYTFGGGTKLEIK

SEQ ID NO: 743 - protein, 116 aa, synthetic construct
  source 1..116: note = Hu2EF-7[TROP2]_vh
QVQLVQSGAEVKKPGASVKVSCKASGYTFTNYWIGWVKQAPGQGLEWIGDIYPGGGYTNYNEKFKGRATLTADTSASTAYMELSSLRSEDTAVYYCARGTGGGDYWGQGTLVTVSS

SEQ ID NO: 744 - protein, 111 aa, synthetic construct
  source 1..111: note = Hu2EF-7[TROP2]_vl
DIVLTQSPDSLAVSLGERATINCRASQSVSTSSYSYMHWYQQKPGQPPKLLIKYASNLESGVPDRFSGSGSGTDFTLTISSLQAEDVAVYYCQHSWEIPYTFGGGTKLEIK

SEQ ID NO: 745 - protein, 119 aa, synthetic construct
  source 1..119: note = Hu2G10-5[TROP2]_vh
QVQLVQSGAEVKKPGASVKVSCKASGFTFSSSYISWLRQAPGQRLEWIAWIYAGTGGTSYNQKFTGKATLTVDTSASTAYMELSSLRSEDTAVYYCARHNPRYYAMDYWGQGTTVTVSS

SEQ ID NO: 746 - protein, 107 aa, synthetic construct
  source 1..107: note = Hu2G10-5[TROP2]_vl
DTQMTQSPSSLSASVGDRVTITCITSTDIDDDMNWYQQKPGKAPKLLISEGNTLRPGVPSRFSGSGYGTDFTFTISSLQPEDIATYYCLQSDNLPYTFGGGTKVEIK

SEQ ID NO: 747 - protein, 119 aa, synthetic construct
  source 1..119: note = Hu2G10-6[TROP2]_vh
QVQLVQSGAEVKKPGASVKVSCKASGFTFSSSYISWLRQAPGQRLEWIAWIYAGTGGTSYNQKFTGRVTLTVDTSASTAYMELSSLRSEDTAVYYCARHNPRYYAMDYWGQGTTVTVSS

SEQ ID NO: 748 - protein, 107 aa, synthetic construct; identical to SEQ ID NO: 746
  source 1..107: note = Hu2G10-6[TROP2]_vl

SEQ ID NO: 749 - protein, 121 aa, synthetic construct
  source 1..121: note = BAT-806[TROP2]_vh
QVQLQQSGSELKKPGASVKVSCKASGYTFTNYGMNWVKQAPGQGLKWMGWINTYTGEPTYTDDFKGRFAFSLDTSVSTAYLQISSLKADDTAVYFCARGGFGSSYWYFDVWGQGTLVTVSS

SEQ ID NO: 750 - protein, 107 aa, synthetic construct; identical to SEQ ID NO: 673
  source 1..107: note = BAT-806[TROP2]_vl

SEQ ID NO: 751 - protein, 116 aa, synthetic construct
  source 1..116: note = trop2-ab7[TROP2]_vh
QVQLQQSGPEVVKPGASVKMSCKASGYRFTDYVINWVKQRSGQGLEWIGQIYPGSDTFHYNKNFKGKATLTADKSSNTAYMQLNSLTSEDSAVYFCARFFEGFAYWGQGTLVTVSA

SEQ ID NO: 752 - protein, 107 aa, synthetic construct
  source 1..107: note = trop2-ab7[TROP2]_vl
DIKMTQSPSSMYAFLGERVTITCKASQGINNYLSWFHLKPGKSPKSLIYRANRLVDGVPSRFSGSGSGQDYSLTISSLDYEDVGIYYCLQYDEFPLTFGGGTKLELK

SEQ ID NO: 753 - protein, 116 aa, synthetic construct
  source 1..116: note = Trop2-Ab8TROP2[TROP2]_vh
QVQLQQSGPEVVKPGASVKMSCKASGYRFTDYVINWVKQRTGQGLEWIGQIYPGSDSFHYNKNFKGKATLTADKSSNTAYMQLNSLTSEDSAVYFCARFFEGLAYWGQGTLVTVSA

SEQ ID NO: 754 - protein, 107 aa, synthetic construct
  source 1..107: note = Trop2-Ab8TROP2[TROP2]_vl
DIKMTQSPSSMYAFLGERVTITCKASQGINNYLSWFQLKPGKSPKSLIYRANRLVDGVPSRFSGSGSGQDYSLTISSLDYEDMGIYYCLQYDEFPLTFGGGTKLELK

SEQ ID NO: 755 - protein, 116 aa, synthetic construct
  source 1..116: note = Trop2-Ab22[TROP2]_vh
QVQLQQSGPELVKPGASVKMSCKASGYTFTDYVINWVKQRPGQGLEWVGQIYPGSDGTYYNEPFKGEATLTADKSSNTAYMQLSSLTSEDSAVYFCARFFEGFAYWGQGTLVTVSA

SEQ ID NO: 756 - protein, 107 aa, synthetic construct
  source 1..107: note = Trop2-Ab22[TROP2]_vl
DIKMTQSPSSMFASLGERVTITCKASQDINWYLSWFQQKPGKSPKTLIYRANRLVDGVPSRFSGSGSGQDYSLTISSLDYEDMGVYYCLQYEEFPLTFGAGTKLELK

SEQ ID NO: 757 - protein, 116 aa, synthetic construct; identical to SEQ ID NO: 753
  source 1..116: note = Trop2-Ab40TROP2[TROP2]_vh

SEQ ID NO: 758 - protein, 107 aa, synthetic construct
  source 1..107: note = Trop2-Ab40TROP2[TROP2]_vl
DIKMTQSPSSMYAFLGERVTITCTASQGINNYLSWFQLKPGKSPKSLIYRANRLVDGVPSRFSGSGSGQDYSLTISSLDYEDMGIYYCLQYDEFPLTFGGGTKLELK

SEQ ID NO: 759 - protein, 115 aa, synthetic construct
  source 1..115: note = Trop2-Ab46TROP2[TROP2]_vh
QVQLQQPGAELVRPGASVRLSCKSSGYTFTSYWINWVKQRPGQGLEWIGNIFPSHSYTNYNQKFRDKATLTVDKSSSTAYLQLSSPTSDDSAVYYCTRGSGFDYWGQGTALTVSS

SEQ ID NO: 760 - protein, 108 aa, synthetic construct
  source 1..108: note = Trop2-Ab46TROP2[TROP2]_vl
DILLTQSPAILSVSPGERVSFSCRASQNIGTSIHWYQQRTNGSPRLLISYASESISGIPSRFSGSGSGTDFTLLIINSVESEDIADYYCQHSYSWPFTFGSGTKLEVK

SEQ ID NO: 761 - protein, 114 aa, synthetic construct
  source 1..114: note = Trop2-Ab50TROP2[TROP2]_vh
QVQLQQSGAELVRPGTSVKISCKASGYTFTNYWLDWIKQRPGQGLEWIGNIFPGGDYTNYNEEFRGKATLTADTSSRTAFMQLSSLTSEDSAVYFCARSSYDYWGQGTLVTVSA

SEQ ID NO: 762 - protein, 107 aa, synthetic construct
  source 1..107: note = Trop2-Ab50TROP2[TROP2]_vl
DILLTQSPAILSVSPGERVSFSCRASQNIGTSIHWYQQRTNGSPRLLIKYSSESISGIPSRFSGSGSGTDFSLTINSVESEDIGDYYCQHSYTWPFTFGSGTKLEIK

SEQ ID NO: 763 - protein, 116 aa, synthetic construct
  source 1..116: note = Trop2-Ab51TROP2[TROP2]_vh
QVQLQQSGPEVVKPGASVKMSCRASGYRFTDYVINWVKQRTGQGLEWIGQIYPGSDSFHYNKNFKGKATLTADKSSNTAYMQLNSLTSEDSAVYFCARFFEGFAYWGQGTLVTVSA

SEQ ID NO: 764 - protein, 107 aa, synthetic construct; identical to SEQ ID NO: 754
  source 1..107: note = Trop2-Ab51TROP2[TROP2]_vl

SEQ ID NO: 765 - protein, 119 aa, synthetic construct
  source 1..119: note = 1B3[TROP2]_vh
QVQLQQSGAELVRPGVSVKISCKGSGYTFTDYSINWVKQSHAKSLEWIGVISTYYGDASYNQKFKGKATMTVDKSSSTAYMELARLTSEDSAIYYCARYGDGYNQFDYWGQGTTLTVSS

SEQ ID NO: 766 - protein, 111 aa, synthetic construct
  source 1..111: note = 1B3[TROP2]_vl
DIVLTQSPASLAVSLGQRATISCRVSESVDSYGNNFMHWYQQKPGQPPKLLIYRASNLESGVPARFSGSGSGTDFTLTINPMEADDVATYYCQQSYEDPYTFGGGTKLEIK

SEQ ID NO: 767 - protein, 118 aa, synthetic construct
  source 1..118: note = 15D9[TROP2]_vh
QVQLQQSGAELVRPGVSVKISCKGSGYTFTDYSIHWVKQSHAKSLEWIGVISSYYGDATYNQKFKGKATMTVDKSSSTAYMELARLTSEDSAIYYCALLGAYNYFDYWGQGTTLTVSS

SEQ ID NO: 768 - protein, 111 aa, synthetic construct
  source 1..111: note = 15D9[TROP2]_vl
DIVLTQSPASLAVSLGQRATISCRASESVDSYGNSFMHWYQQKPGQPPKLLVYRASNLESGIPARFSGSGSRTDFTLTINPVEADDVATYYCQQSYEDPPTFGGGTKLEIK

SEQ ID NO: 769 - protein, 118 aa, synthetic construct
  source 1..118: note = 15A10[TROP2]_vh
EVQLEQSGPGLVQPSQSLSITCTVSGFSLTRYGVHWVRQSPGRSLEWLGVIWSGGNTDYNAAFISRLTITKDNSKSQVFFKMNSLQPNDTGVYYCAREDRYVGEFAYWGQGTLVTVSA

SEQ ID NO: 770 - protein, 111 aa, synthetic construct
  source 1..111: note = 15A10[TROP2]_vl
DIVLTQSTASLAVSLGQRATISCRASESVDSYGNSFIHWYQQKPGQPPKLLIYRASNLESGIPARFSGSGSRTDFTLTINPVEADDVATYYCQQSNEDPRTFGGGTKLEIK

SEQ ID NO: 771 - protein, 118 aa, synthetic construct
  source 1..118: note = 17B6[TROP2]_vh
QVQLQQSGAELVRPGVSVKISCKGSGYTFTDYGMNWVKQSHAKSLEWIGVISTFYGDANYNQKFKGKATMTVDKSSSTAYMELARLTSEDSAIYYCARRGNYDSMDYWGQGTSVTVSS

SEQ ID NO: 772 - protein, 111 aa, synthetic construct
  source 1..111: note = 17B6[TROP2]_vl
DIVLTQSPVFLAVSLGQRATISCRASESVDSYGNSFMHWYQQKPGQPPKLLIYRASNLESGIPARFSGSGSRTDFTLTINPVEADDVETYYCQQSYEDPPTFGGGTKLEIE

SEQ ID NO: 773 - protein, 118 aa, synthetic construct
  source 1..118: note = 17D1[TROP2]_vh
QVQLQQSGAELVRPGVSVKISCKGSGYTFTDYSIHWVKQSHAKSLEWIGLISTYYGDATYTQKFKGKATMTVDKSSSTAYMELARLTSEDSAIYYCALLGAYNYFDYWGQGTTLTVSS

SEQ ID NO: 774 - protein, 111 aa, synthetic construct
  source 1..111: note = 17D1[TROP2]_vl
DIVLTQSPASLAVSLGQRATISCRASESVDSYGNSFMHWYQQKPGQPPKLLVYRASNLESGIPARFSGSGSRTDFTLTINPVEADDIATYYCQQSYEDPPTFGGGTKLEIK

SEQ ID NO: 775 - protein, 121 aa, synthetic construct
  source 1..121: note = M1[TROP2]_vh
QVQLQQPGAELVRPGASVKLSCRASGYTFTNYWMNWVKQRPEQGLEWIGRIDPNDSETHYNQKFKDRAILTVDKASNTAYMQLSGLTSEDSAVHYCARSGFGSTYWFFDVWGAGTTVTVSS

SEQ ID NO: 776 - protein, 107 aa, synthetic construct
  source 1..107: note = M1[TROP2]_vl
DIVMTQSHKFMSTSVGDRVSITCKASQDVSTAVAWYQQKPGQSPKLLIYSASYRYTGVPDRFAGSGYGTDFTFTISSVQTEDLTVYHCQQHYSTPLTFGPGTRLELK

SEQ ID NO: 777 - protein, 121 aa, synthetic construct
  source 1..121: note = HU1[TROP2]_vh
QVQLVQSGAEVKKPGSSVKVSCKASGYTFTNYWMNWVRQAPGKGLEWVGRIDPNDSETHYNQKFKDRFTITRDNSKNTLYLQMNSLRAEDTAVYYCARSGFGSTYWFFDVWGQGTTVTVSS

SEQ ID NO: 778 - protein, 107 aa, synthetic construct
  source 1..107: note = HU1[TROP2]_vl
AIRMTQSPFSLSASVGDRVTITCKASQDVSTAVAWYLQKPGQSPQLLIYSASYRYTRIPPRFSGSGYGTDFTLTINNIESEDAAYYFCQQHYSTPLTFGQGTRLEIK

SEQ ID NO: 779 - protein, 121 aa, synthetic construct
  source 1..121: note = HU2[TROP2]_vh
EVQLLESGGGLVQPGGSLRLSCAASGFTFSNYWMNWVRQAPGKGLEWIGRIDPNDSETHYNQKFKDRVTISVDKSKNQFSLKLSSVTAADTAVYYCARSGFGSTYWFFDVWGQGTTVTVSS

SEQ ID NO: 780 - protein, 107 aa, synthetic construct
  source 1..107: note = HU2[TROP2]_vl
ETTLTQSPAFMSATPGDKVNISCKASQDVSTAVAWYLQKPGQSPQLLIYSASYRYTGVPDRFSGSGSGTDFTLTISSLQAEDVAVYYCQQHYSTPLTFGQGTRLEIK

SEQ ID NO: 781 - protein, 121 aa, synthetic construct
  source 1..121: note = HU3[TROP2]_vh
EVQLVESGGGLVQPGGSLRLSCAASGFTFSNYWMNWVRQAPGKGLEWMGRIDPNDSETHYNQKFKDRVTISVDKSKNQFSLKLSSVTAADTAVYYCARSGFGSTYWFFDVWGQGTMVTVSS

SEQ ID NO: 782 - protein, 107 aa, synthetic construct
  source 1..107: note = HU3[TROP2]_vl
DIVMTQTPLSLPVTPGEPASISCKASQDVSTAVAWYLQKPGQSPQLLIYSASYRYTGVPSRFSGSGSGTDFTLTINSLEAEDAATYYCQQHYSTPLTFGQGTRLEIK

SEQ ID NO: 783 - protein, 121 aa, synthetic construct
  source 1..121: note = HU4[TROP2]_vh
EVQLVESGGGLVQPGGSLRLSCAASGFTFSNYWMNWVRQAPGKGLEWIGRIDPNDSETHYNQKFKDRVTMTRDTSTSTVYMELSSLRSEDTAVYYCARSGFGSTYWFFDVWGQGTMVTVSS

SEQ ID NO: 784 - protein, 107 aa, synthetic construct
  source 1..107: note = HU4[TROP2]_vl
DIVMTQSPDSLAVSLGERATINCKASQDVSTAVAWYQQKPGQAPRLLIYSASYRYTGVPSRFSGSGSGTDFTLTINSLEAEDAATYYCQQHYSTPLTFGQGTRLEIK

SEQ ID NO: 785 - protein, 121 aa, synthetic construct
  source 1..121: note = HU5[TROP2]_vh
EVQLVESGGGLVQPGGSLRLSCAASGFTVSNYWMNWVRQAPGKGLEWIGRIDPNDSETHYNQKFKDRVTMTRDTSTSTVYMELSSLRSEDTAVYYCARSGFGSTYWFFDVWGQGTTVTVSS

SEQ ID NO: 786 - protein, 107 aa, synthetic construct
  source 1..107: note = HU5[TROP2]_vl
DIQMTQSPSSLSASVGDRVTITCKASQDVSTAVAWYQQKPGKAPKLFIYSASYRYTGVPDRFSGSGSGTDFTLKISRVEAEDVGVYYCQQHYSTPLTFGQGTRLEIK

SEQ ID NO: 787 - protein, 121 aa, synthetic construct
  source 1..121: note = HU6[TROP2]_vh
EVQLLESGGGLVQPGGSLRLSCAASGFTVSNYWMNWVRQAPGKGLEWMGRIDPNDSETHYNQKFKDRVTISVDKSKNQFSLKLSSVTAADTAVYYCARSGFGSTYWFFDVWGQGTTVTVSS

SEQ ID NO: 788 - protein, 107 aa, synthetic construct
  source 1..107: note = HU6[TROP2]_vl
DVVMTQSPLSLPVTLGQPASISCKASQDVSTAVAWYQQKPGKAPKLFIYSASYRYTGVPSRFSGSGSGTDFTLTISSLQPEDFATYYCQQHYSTPLTFGQGTRLEIK

SEQ ID NO: 789 - protein, 121 aa, synthetic construct
  source 1..121: note = HU7[TROP2]_vh
EVQLVESGGGLIQPGGSLKLSCAASGFTVSNYWMNWVRQAPGKGLEWMGRIDPNDSETHYNQKFKDRVTMTRDTSTSTVYMELSSLRSEDTAVYYCARSGFGSTYWFFDVWGQGTTVTVSS

SEQ ID NO: 790 - protein, 107 aa, synthetic construct
  source 1..107: note = HU7[TROP2]_vl
AIRMTQSPFSLSASVGDRVTITCKASQDVSTAVAWYLQKPGQSPQLLIYSASYRYTGVPDRFSGSGSGTDFTLKISRVEAEDVGVYYCQQHYSTPLTFGQGTRLEIK

SEQ ID NO: 791 - protein, 121 aa, synthetic construct
  source 1..121: note = HU8[TROP2]_vh
QVQLVQSGAEVKKPGASVKVSCKASGYTFTNYWMNWVRQAPGKGLEWMGRIDPNDSETHYNQKFKDRVTMTRDTSTSTVYMELSSLRSEDTAVYYCARSGFGSTYWFFDVWGQGTTVTVSS

SEQ ID NO: 792 - protein, 107 aa, synthetic construct
  source 1..107: note = HU8[TROP2]_vl
AIRMTQSPFSLSASVGDRVTITCKASQDVSTAVAWYLQKPGQSPQLLIYSASYRYTGVPSRFSGSGSGTDFTLKISRVEAEDVGVYYCQQHYSTPLTFGQGTRLEIK

SEQ ID NO: 793 - protein, 121 aa, synthetic construct
  source 1..121: note = HU9[TROP2]_vh
EVQLVESGGGLIQPGGSLRLSCAASGFTVSNYWMNWVRQAPGQGLEWMGRIDPNDSETHYNQKFKDRLTITKDTSKNQVVLTMTNMDPVDTATYYCARSGFGSTYWFFDVWGQGTTVTVSS

SEQ ID NO: 794 - protein, 107 aa, synthetic construct
  source 1..107: note = HU9[TROP2]_vl
DIVMTQTPLSLPVTPGEPASISCKASQDVSTAVAWYLQKPGQSPQLLIYSASYRYTGVPDRFSGSGSGTDFTLTISSLQAEDVAVYYCQQHYSTPLTFGQGTRLEIK

SEQ ID NO: 795 - protein, 116 aa, synthetic construct; identical to SEQ ID NO: 701
  source 1..116: note = HV0_VH[TROP2]_vh

SEQ ID NO: 796 - protein, 116 aa, synthetic construct; identical to SEQ ID NO: 703
  source 1..116: note = HV3a_VH[TROP2]_vh

SEQ ID NO: 797 - protein, 116 aa, synthetic construct; identical to SEQ ID NO: 705
  source 1..116: note = HV4_VH[TROP2]_vh

SEQ ID NO: 798 - protein, 116 aa, synthetic construct; identical to SEQ ID NO: 707
  source 1..116: note = HV5_VH[TROP2]_vh

SEQ ID NO: 799 - protein, 116 aa, synthetic construct; identical to SEQ ID NO: 709
  source 1..116: note = HV10_VH[TROP2]_vh

SEQ ID NO: 800 - protein, 113 aa, synthetic construct; identical to SEQ ID NO: 702
  source 1..113: note = LV0_VL[TROP2]_vl

SEQ ID NO: 801 - protein, 113 aa, synthetic construct; identical to SEQ ID NO: 710
  source 1..113: note = LV2_VL[TROP2]_vl

SEQ ID NO: 802 - protein, 113 aa, synthetic construct; identical to SEQ ID NO: 712
  source 1..113: note = LV4_VL[TROP2]_vl

SEQ ID NO: 803 - protein, 121 aa, synthetic construct
  source 1..121: note = hTINA1 H1_VH[TROP2]_vh
QVQLVQSGAEVKKPGASVKVSCKASGYTFTTAGMQWVRQAPGQGLEWMGWINTHSGVPKYAEDFKGRVTISADTSTSTAYLQLSSLKSEDTAVYYCARSGFGSSYWYFDVWGQGTLVTVSS

SEQ ID NO: 804 - protein, 121 aa, synthetic construct
  source 1..121: note = hTINA1 H2_VH[TROP2]_vh
QVQLVQSGAEVKKPGASVKVSCKASGYTFTTAGMQWVRQAPGQGLEWMGWINTHSGVPKYAEDFKGRVTISLDTSTSTAYLQLSSLKSEDTAVYYCARSGFGSSYWYFDVWGQGTLVTVSS

SEQ ID NO: 805 - protein, 121 aa, synthetic construct
  source 1..121: note = hTINA1 H3_VH[TROP2]_vh
QIQLVQSGAEVKKPGESVKVSCKASGYTFTTAGMQWVQQMPGKGLEWMGWINTHSGVPKYAEDFKGRVTFSLDTSTSTAYLQLSSLKSEDTAVYYCARSGFGSSYWYFDVWGQGTLVTVSS

SEQ ID NO: 806 - protein, 107 aa, synthetic construct
  source 1..107: note = hTINA1 L1_VL[TROP2]_vl
DIQMTQSPSSLSASVGDRVTITCKASQDVSTAVAWYQQKPGKAPKLLIYSASYRYTGVPSRFSGSGSGTDFTLTISSLQPEDFAVYYCQQHYITPLTFGQGTKLEIK

SEQ ID NO: 807 - protein, 107 aa, synthetic construct
  source 1..107: note = hTINA1 L2_VL[TROP2]_vl
DIVMTQSPSSLSASVGDRVTITCKASQDVSTAVAWYQQKPGKAPKLLIYSASYRYTGVPSRFSGSGSGTDFTLTISSLQPEDFAVYYCQQHYITPLTFGQGTKLEIK

SEQ ID NO: 808 - protein, 107 aa, synthetic construct
  source 1..107: note = hTINA1 L3_VL[TROP2]_vl
DIVMTQSPSSLSASVGDRVTITCKASQDVSTAVAWYQQKPGKQPKLLIYSASYRYTGVPSRFSGSGSGTDFTLTISSLQPEDFAVYYCQQHYITPLTFGQGTKLEIK

SEQ ID NO: 809 - protein, 116 aa, synthetic construct
  source 1..116: note = Hu2EF_VH4_VH[TROP2]_vh
QVQLVQSGAEVKKPGASVKVSCKASGYTFTNYWIGWVRQAPGQGLEWIGDIYPGGGYTNYNEKFKGRATLTADTSASTAYMELSSLRSEDTAVYYCARGTGGGDYWGQGTLVTVSS

SEQ ID NO: 810 - protein, 116 aa, synthetic construct
  source 1..116: note = Hu2EF_VH5_VH[TROP2]_vh
QVQLVQSGAEVKKPGASVKVSCKASGYTFTNYWIGWVRQAPGQGLEWIGDIYPGGGYTNYNEKFKGRATLTADTSTSTAYMELSSLRSEDTAVYYCARGTGGGDYWGQGTLVTVSS

SEQ ID NO: 811 - protein, 116 aa, synthetic construct; identical to SEQ ID NO: 743
  source 1..116: note = Hu2EF_VH7_VH[TROP2]_vh

SEQ ID NO: 812 - protein, 111 aa, synthetic construct
  source 1..111: note = Hu2EF_VL1_VL[TROP2]_vl
DIVMTQSPDSLAVSLGERATINCRASQSVSTSSYSYMHWYQQKPGQPPKLLIKYASNLESGVPDRFSGSGSGTDFTLTISSLQAEDVAVYYCQHSWEIPYTFGQGTKLEIK

SEQ ID NO: 813 - protein, 111 aa, synthetic construct; identical to SEQ ID NO: 744
  source 1..111: note = Hu2EF_VL2_VL[TROP2]_vl

SEQ ID NO: 814 - protein, 119 aa, synthetic construct; identical to SEQ ID NO: 745
  source 1..119: note = Hu2G10_VH1_VH[TROP2]_vh

SEQ ID NO: 815 - protein, 119 aa, synthetic construct; identical to SEQ ID NO: 747
  source 1..119: note = Hu2G10_VH2_VH[TROP2]_vh

SEQ ID NO: 816 - protein, 107 aa, synthetic construct
  source 1..107: note = Hu2G10_VL1_VL[TROP2]_vl
DIQMTQSPSSLSASVGDRVTITCITSTDIDDDMNWYQQKPGKAPKLLISEGNTLRPGVPSRFSGSGYGTDFTFTISSLQPEDIATYYCLQSDNLPYTFGGGTKVEIK

SEQ ID NO: 817 - protein, 107 aa, synthetic construct
  source 1..107: note = Hu2G10_VL2_VL[TROP2]_vl
DIQMTQSPSSLSASVGDRVTITCITSTDIDDDMNWYQQKPGKAPKLLISEGNTLRPGVPSRFSGSGSGTDFTFTISSLQPEDIATYYCLQSDNLPYTFGGGTKVEIK

SEQ ID NO: 818 - protein, 107 aa, synthetic construct; identical to SEQ ID NO: 746
  source 1..107: note = Hu2G10_VL3_VL[TROP2]_vl

SEQ ID NO: 819 - protein, 119 aa, synthetic construct
  source 1..119: note = DP002 HC1_VH[TROP2]_vh
QVQLVQSGAEVKKPGASVKVSCKASGYTFTDYSINWVRQAPGQGLEWMGVISTYYGDASYNQKFKGRVTMTTDTSTSTAYMELRSLRSDDTAVYYCARYGDGYNQFDYWGQGTMVTVSS

SEQ ID NO: 820 - protein, 119 aa, synthetic construct
  source 1..119: note = DP002 HC2_VH[TROP2]_vh
QVQLVQSGAEVKKPGASVKVSCKASGYTFTDYSINWVRQAPGQGLEWMGVISTYYGDASYNQKFKGRVTMTRDTSTSTVYMELSSLRSEDTAVYYCARYGDGYNQFDYWGQGTLVTVSS

SEQ ID NO: 821 - protein, 119 aa, synthetic construct
  source 1..119: note = DP002 HC3_VH[TROP2]_vh
QVQLVQSGAEVKKPGASVKVSCKASGYTFTDYSINWVRQAPGQRLEWMGVISTYYGDASYNQKFKGRVTITRDTSASTAYMELSSLRSEDTAVYYCARYGDGYNQFDYWGQGTLVTVSS

SEQ ID NO: 822 - protein, 119 aa, synthetic construct
  source 1..119: note = DP002 HC4_VH[TROP2]_vh
QVQLVQSGAEVKKPGSSVKVSCKASGYTFTDYSINWVRQAPGQGLEWMGVISTYYGDASYNQKFKGRVTITADESTSTAYMELSSLRSEDTAVYYCARYGDGYNQFDYWGQGTLVTVSS

SEQ ID NO: 823 - protein, 119 aa, synthetic construct
  source 1..119: note = DP002 HC5_VH[TROP2]_vh
EVQLVQSGAEVKKPGESLKISCKGSGYTFTDYSINWVRQMPGKGLEWMGVISTYYGDASYNQKFKGQVTISADKSISTAYLQWSSLKASDTAMYYCARYGDGYNQFDYWGQGTLVTVSS

SEQ ID NO: 824 - protein, 111 aa, synthetic construct
  source 1..111: note = DP002 LC1_VL[TROP2]_vl
DIVMTQSPDSLAVSLGERATINCRVSESVDSYGNNFMHWYQQKPGQPPKLLIYRASNLESGVPDRFSGSGSGTDFTLTISSLQAEDVAVYYCQQSYEDPYTFGQGTKLEIK

SEQ ID NO: 825 - protein, 111 aa, synthetic construct
  source 1..111: note = DP002 LC2_VL[TROP2]_vl
DVVMTQSPLSLPVTLGQPASISCRVSESVDSYGNNFMHWFQQRPGQSPRRLIYRASNLESGVPDRFSGSGSGTDFTLKISRVEAEDVGVYYCQQSYEDPYTFGGGTKVEIK

SEQ ID NO: 826 - protein, 111 aa, synthetic construct
  source 1..111: note = DP002 LC3_VL[TROP2]_vl
DIVMTQSPLSLPVTPGEPASISCRVSESVDSYGNNFMHWYLQKPGQSPQLLIYRASNLESGVPDRFSGSGSGTDFTLKISRVEAEDVGVYYCQQSYEDPYTFGGGTKVEIK

SEQ ID NO: 827 - protein, 111 aa, synthetic construct
  source 1..111: note = DP002 LC4_VL[TROP2]_vl
EIVLTQSPATLSLSPGERATLSCRVSESVDSYGNNFMHWYQQKPGQAPRLLIYRASNLESGIPARFSGSGSGTDFTLTISSLEPEDFAVYYCQQSYEDPYTFGGGTKVEIK

SEQ ID NO: 828 - protein, 111 aa, synthetic construct
  source 1..111: note = DP002 LC5_VL[TROP2]_vl
DIQMTQSPSSLSASVGDRVTITCRVSESVDSYGNNFMHWYQQKPGKAPKLLIYRASNLESGVPSRFSGSGSGTDFTFTISSLQPEDIATYYCQQSYEDPYTFGGGTKLEIK

SEQ ID NO: 829 - protein, 139 aa, synthetic construct
  source 1..139: note = sacituzumab (Immunomedics/SeaGen)_IMMU-132_variable Heavy_Chain
MGWSCIILFLVATATGVHSVQLQQSGSELKKPGASVKVSCKASGYTFTNYGMNWVKQAPGQGLKWMGWINTYTGEPTYTDDFKGRFAFSLDTSVSTAYLQISSLKADDTAVYFCARGGFGSSYWYFDVWGQGSLVTVSS

SEQ ID NO: 830 - protein, 126 aa, synthetic construct
  source 1..126: note = sacituzumab (Immunomedics/SeaGen)_IMMU-132_variable Light_chain
MGWSCIILFLVATATGVHSDIQLTQSPSSLSASVGDRVSITCKASQDVSIAVAWYQQKPGKAPKLLIYSASYRYTGVPDRFSGSGSGTDFTLTISSLQPEDFAVYYCQQHYITPLTFGAGTKVEIK

SEQ ID NO: 831 - protein, 449 aa, synthetic construct
  source 1..449: note = girentuximab_heavy_chain
DVKLVESGGGLVKLGGSLKLSCAASGFTFSNYYMSWVRQTPEKRLELVAAINSDGGITYYLDTVKGRFTISRDNAKNTLYLQMSSLKSEDTALFYCARHRSGYFSMDYWGQGTSVTVSSASTKGPSVFPLAPSSKSTSGGTAALGCLVKDYFPEPVTVSWNSGALTSGVHTFPAVLQSSGLYSLSSVVTVPSSSLGTQTYICNVNHKPSNTKVDKKVEPKSCDKTHTCPPCPAPELLGGPSVFLFPPKPKDTLMISRTPEVTCVVVDVSHEDPEVKFNWYVDGVEVHNAKTKPREEQYNSTYRVVSVLTVLHQDWLNGKEYKCKVSNKALPAPIEKTISKAKGQPREPQVYTLPPSRDELTKNQVSLTCLVKGFYPSDIAVEWESNGQPENNYKTTPPVLDSDGSFFLYSKLTVDKSRWQQGNVFSCSVMHEALHNHYTQKSLSLSPGK

SEQ ID NO: 832 - protein, 214 aa, synthetic construct
  source 1..214: note = girentuximab_light_chain
DIVMTQSQRFMSTTVGDRVSITCKASQNVVSAVAWYQQKPGQSPKLLIYSASNRYTGVPDRFTGSGSGTDFTLTISNMQSEDLADFFCQQYSNYPWTFGGGTKLEIKRTVAAPSVFIFPPSDEQLKSGTASVVCLLNNFYPREAKVQWKVDNALQSGNSQESVTEQDSKDSTYSLSSTLTLSKADYEKHKVYACEVTHQGLSSPVTKSFNRGEC

SEQ ID NO: 833 - protein, 120 aa, synthetic construct [sequence omitted]

SEQ ID NO: 834 - protein, 113 aa, synthetic construct [sequence omitted]

SEQ ID NO: 835 - protein, 121 aa, synthetic construct
  source 1..121: note = vibecotamab_anti-IL-3RA_heavy_chain
QVQLQQSGAEVKKPGASVKVSCKASGYTFTDYYMKWVKQSHGKSLEWMGDIIPSNGATFYNQKFKGKATLTVDRSTSTAYMELSSLRSEDTAVYYCARSHLLRASWFAYWGQGTLVTVSSA

SEQ ID NO: 836 - protein, 113 aa, synthetic construct
  source 1..113: note = vibecotamab_anti-IL-3RA_light_chain
DFVMTQSPDSLAVSLGERATINCKSSQSLLNTGNQKNYLTWYQQKPGQPPKLLIYWASTRESGVPDRFTGSGSGTDFTLTISSLQAEDVAVYYCQNDYSYPYTFGGGTKLEIK

SEQ ID NO: 837 - protein, 118 aa, synthetic construct
  source 1..118: note = Amgen (WO2021/092134)_VH
QVQLQESGPGLVKPSETLSLTCTVSGGSISSYYWSWIRQPPGKCLEWIGYVYYSGTTNYNPSLKSRVTISVDTSKNQFSLKLSSVTAADTAVYYCASIAVTGFYFDYWGQGTLVTVSS

SEQ ID NO: 838 - protein, 108 aa, synthetic construct
  source 1..108: note = Amgen (WO2021/092134)_VL
EIVLTQSPGTLSLSPGERVTLSCRASQRVNNNYLAWYQQRPGQAPRLLIYGASSRATGIPDRFSGSGSGTDFTLTISRLEPEDFAVYYCQQYDRSPLTFGCGTKLEIK

SEQ ID NO: 839 - protein, 118 aa, synthetic construct; identical to SEQ ID NO: 837
  source 1..118: note = Amgen WO2018/04907_VH

SEQ ID NO: 840 - protein, 108 aa, synthetic construct; identical to SEQ ID NO: 838
  source 1..108: note = Amgen WO2018/04907_VL

SEQ ID NO: 841 - protein, 121 aa, synthetic construct
  source 1..121: note = Chugai (US2021/0380715)_DL301_VH
QVQLQQSGADLVRPGTSVKVSCKASGYAFTNYLIEWIKQRPGQGLEWIGVMNPGSGGTHYSEKFRGKATLTADKSSSTAYMQLISLTSDDSAVYFCARSDYDYVTYAMDYWGQGTSVTVSS

SEQ ID NO: 842 - protein, 107 aa, synthetic construct
  source 1..107: note = Chugai (US2021/0380715)_DL301_VL
DIKMTQSPSSMYASLGERVTITCKASQDINSYLIWFQQKPGKSPKTLIYRTNRLVDGVPSRFSGSGSGQDYSLTISSLEYGDMGIYYCLQYDEFPFTFGSGTKLEIK

SEQ ID NO: 843 - protein, 118 aa, synthetic construct
  source 1..118: note = Chugai (US2021/0380715)_DL306_VH
EVQLQQSGPELVKPGASVKMSCRASGYTFTDYYMKWVKQSHGKSLEWIGDINPNNGDTFYNQKFKGKATLTIDKSSSTAYMQLNSLTSDDSAVYYCARDGNYAYFDYWGQGTTLTVSS

SEQ ID NO: 844 - protein, 111 aa, synthetic construct
  source 1..111: note = Chugai (US2021/0380715)_DL306_VL
DIVLTQSPASLAVSLGQRATISCRASKSVSTSGYSYMHWYQQKPGQPPKLLIFLASNLESGVPARFSGSGSGTDFTLNIHPVEEEDAATYYCQHSRHLPWTFGGGTKLEIK

SEQ ID NO: 845 - protein, 119 aa, synthetic construct
  source 1..119: note = Chugai (US2021/0380715)_DL309_VH
QVQLQQSGGDLMKPGASVKISCKAAGYTFSNYYIEWVKQRPGHGLEWIGEILPGSGSTTYNEKFKGKASFTADTSSNTAYMQLSSLTSEDSAVYYCARWGAREPGFPYWGQGTLVTVSA

SEQ ID NO: 846 - protein, 107 aa, synthetic construct
  source 1..107: note = Chugai (US2021/0380715)_DL309_VL
DIVMTQSQKFMSTSVGDRVSVTCKASQNVGTNVAWYQQKPGQSPKALIYSASYRYSGVPDRFTGSGSGTDFTLTISNVQSEDLAEYFCQQYNNYPLTFGAGTKLELK

SEQ ID NO: 847 - protein, 123 aa, synthetic construct
  source 1..123: note = Chugai (US2021/0380715)_DL312_VH
EVKLVESGGGLVQPGGSLSLSCAASGFTFTDYYMNWVRQPPGKALEWLALIRNKANGYTTEYNASVKGRFTISRDNSQNILYLQMNALRAEDSATYYCARDSDGYYEYYFDYWGQGTTLTVSS

SEQ ID NO: 848 - protein, 107 aa, synthetic construct
  source 1..107: note = Chugai (US2021/0380715)_DL312_VL
DIQMTQSPSSLSASLGERVSLTCRASQEISDYLSWLQQKPDGTIKRLIFAASTLDSGVPKRFSGSRSGSDFSLSISSLESEDFADYYCLQYASYPYTFGSGTKLEIK

SEQ ID NO: 849 - protein, 120 aa, synthetic construct
  source 1..120: note = Dragonfly WO2019/195408_5E7_VH
QVQLVQSGAEVKKPGASVKVSCKASGFNIKDDYIHWVRQAPGQGLEWMGWIDSENGDTEYASKFQGRVTITADTSANTAYMELSSLRSEDTAVYYCATSSYYSYDLFVYWGQGTLVTVSS

SEQ ID NO: 850 - protein, 111 aa, synthetic construct
  source 1..111: note = Dragonfly WO2019/195408_5E7_VL
DVQMTQSPSSLSASVGDRVTITCKSSQSLLHSNGKTYLNWLQQKPGQAPKLLLYLVSKLESGVPSRFSGSGSGTDYTLTISSLQPEDFATYYCLQTTHLYTFGQGTKLEIK

SEQ ID NO: 851 - protein, 120 aa, synthetic construct
  source 1..120: note = Dragonfly WO2019/195408_H5E7-YD-C6_VH
QVQLVQSGAEVKKPGASVKVSCKASGFNIKDDYIHWVRQAPGQGLEWMGWIDSENGDTEYASKFQGRVTITADTSANTAYMELSSLRSEDTAVYYCATSEYYSYDLFVYWGQGTLVTVSS

SEQ ID NO: 852 - protein, 111 aa, synthetic construct; identical to SEQ ID NO: 850
  source 1..111: note = Dragonfly WO2019/195408_H5E7-YD-C6_VL

SEQ ID NO: 853 - protein, 120 aa, synthetic construct
  source 1..120: note = Dragonfly WO2019/195408_H5E7-YD-F3_VH
QVQLVQSGAEVKKPGASVKVSCKASGFNIKDDYIHWVRQAPGQGLEWMGWIDSENGDTEYASKFQGRVTITADTSANTAYMELSSLRSEDTAVYYCATSSYWSYDLLVYWGQGTLVTVSS

SEQ ID NO: 854 - protein, 111 aa, synthetic construct; identical to SEQ ID NO: 850
  source 1..111: note = Dragonfly WO2019/195408_H5E7-YD-F3_VL

SEQ ID NO: 855 - protein, 120 aa, synthetic construct
  source 1..120: note = Dragonfly WO2019/195408_H5E7-YD-A6_VH
QVQLVQSGAEVKKPGASVKVSCKASGFNIKDDYIHWVRQAPGQGLEWMGWIDSENGDTEYASKFQGRVTITADTSANTAYMELSSLRSEDTAVYYCATSSYWSYDLFVYWGQGTLVTVSS

SEQ ID NO: 856 - protein, 111 aa, synthetic construct; identical to SEQ ID NO: 850
  source 1..111: note = Dragonfly WO2019/195408_H5E7-YD-A6_VL

SEQ ID NO: 857 - protein, 120 aa, synthetic construct
  source 1..120: note = Dragonfly WO2019/195408_H5E7-YD-B5_VH
QVQLVQSGAEVKKPGASVKVSCKASGFNIKDDYIHWVRQAPGQGLEWMGWIDSENGDTEYASKFQGRVTITADTSANTAYMELSSLRSEDTAVYYCATSTYWSYDLFVYWGQGTLVTVSS

SEQ ID NO: 858 - protein, 111 aa, synthetic construct; identical to SEQ ID NO: 850
  source 1..111: note = Dragonfly WO2019/195408_H5E7-YD-B5_VL

SEQ ID NO: 859 - protein, 119 aa, synthetic construct
  source 1..119: note = Sloan Kettering (WO2021/007371)_7-11-B_VH
EVQLVESGGGLVKPGGSLRLSCAASGFTFSNTWMSWVRQAPGKGLEWVGRIKSKSDGGTTDYAAPVKGRFTISRDDSKNTLYLQMNSLKTEDTAVYYCTQYYWNSFDYWGQGTLVTVSS

SEQ ID NO: 860 - protein, 107 aa, synthetic construct
  source 1..107: note = Sloan Kettering (WO2021/007371)_7-11-B_VL
DIQMTQSPSSLSASVGDRVTITCQASQDISNYLNWYQQKPGKAPKLLIYDASNLETGVPSRFSGSGSGTDFTFTISSLQPEDIATYYCQQYDNLPLTFGGGTKVEIK

SEQ ID NO: 861 - protein, 118 aa, synthetic construct
  source 1..118: note = Sloan Kettering (WO2021/007371)_2-C8-A_VH
EVQLVESGGGLVQPGGSQRLSCAASGFTFSSYWMNWVRQAPGKGLEWVANIKEDGSEKYYVDSVKGRFTISRDNAKNSLYLQMNSLRAEDTAVYYCARDPGWAPFDYWGQGTLVTVSS

SEQ ID NO: 862 - protein, 107 aa, synthetic construct
  source 1..107: note = Sloan Kettering (WO2021/007371)_2-C8-A_VL
DIQMSQSPSSLSASVGDRVTITCRASQGISNYLAWFQQKPGKAPKSLIYAASSLQSGVPSKFSGSGSGTDFTLAISSLQPEDFATYYCQQYNSFPYTFGQGTTLEIK

SEQ ID NO: 863 - protein, 118 aa, synthetic construct
  source 1..118: note = Sloan Kettering (WO2021/007371)_10-O18-A_VH
QVQLQESGPGLVKPSETLSLTCTVSGGSINSYYWSWIRQPPGKGLEWIGYIFYSGITNYNPSLKSRVTISLDTSKNQFSLKLSSVTAADTAVYYCARIGVAGFYFDYWGQGTLVTVSS

SEQ ID NO: 864 - protein, 108 aa, synthetic construct
  source 1..108: note = Sloan Kettering (WO2021/007371)_10-O18-A_VL
EIVLTQSPGTLSLSPGERATLSCRASQSVSSSYLAWYQQKPGQAPRLLIYGASSRATGIPDRFSGSGSGTDFTLTISRLEPEDFAVYYCQQYGTSPLTFGGGTKVEIK

SEQ ID NO: 865 - protein, 120 aa, synthetic construct
  source 1..120: note = Sloan Kettering (WO2021/007371)_6-G23-F_VH
QVQLVQSGAEVKKPGASVKVSCKASGYTFTSYYIHWVRQAPGQGLEWMGIIDPSDGSTNYAQKFQGRVTMTRDTSTSTVYMELSSLRSEDTAVYYCARDREYNYYGLDVWGQGTTVTVSS

SEQ ID NO: 866 - protein, 112 aa, synthetic construct
  source 1..112: note = Sloan Kettering (WO2021/007371)_6-G23-F_VL
DVVMTQSPLSLPVTLGQPASISCRSSQSLVYRDGNTYLNWFQQRPGQSPRRLIYKVSNRDSGVPDRFRGSGSGTDFTLKISRVEAEDVGVYYCMQGTHWPPTFGQGTKVEIK

SEQ ID NO: 867 - protein, 124 aa, synthetic construct
  source 1..124: note = USC (WO2019/067805)_DLL3-hSC16-13_VH
QITLKESGPTLVKPTQTLTLTCTFSGFSLSTSGMGVGWIRQPPGKALEWLAHIWWDDVKRYSPSLKSRLTITKDTSKNQVVLTMTNMDPVDTATYYCARIVSFDNDVVSAMDYWGQGTLVTVSS

SEQ ID NO: 868 - protein, 107 aa, synthetic construct
  source 1..107: note = USC (WO2019/067805)_DLL3-hSC16-13_VL
DIQMTQSPSSLSASVGDRVTITCSASSSVSYMYWYQQKPGKAPKLLIYLTSNLASGVPSRFSGSGSGTDFTLTISSLQPEDFATYYCQQWRSNPFTFGQGTKLEIKR

SEQ ID NO: 869 - protein, 118 aa, synthetic construct
  source 1..118: note = USC (WO2019/067805)_DLL3-hSC16-56 - 11218_VH
QVQLVQSGAEVKKPGASVKVSCKASGYTFTNYGMNWVRQAPGQGLEWMGWINTYTGEPTYADDFKGRVTMTTDTSTSTAYMELRSLRSDDTAVYYCARIGDSSPSDYWGQGTLVTVSS

SEQ ID NO: 870 - protein, 108 aa, synthetic construct
  source 1..108: note = USC (WO2019/067805)_DLL3-hSC16-56 - 11218_VL
EIVMTQSPATLSVSPGERATLSCKASQSVSNDVVWYQQKPGQAPRLLIYYASNRYTGIPARFSGSGSGTEFTLTISSLQSEDFAVYYCQQDYTSPWTFGQGTKLEIKR

SEQ ID NO: 871 - protein, 440 aa, synthetic construct
  source 1..440: note = Nivolumab_Heavy_chain
QVQLVESGGGVVQPGRSLRLDCKASGITFSNSGMHWVRQAPGKGLEWVAVIWYDGSKRYYADSVKGRFTISRDNSKNTLFLQMNSLRAEDTAVYYCATNDDYWGQGTLVTVSSASTKGPSVFPLAPCSRSTSESTAALGCLVKDYFPEPVTVSWNSGALTSGVHTFPAVLQSSGLYSLSSVVTVPSSSLGTKTYTCNVDHKPSNTKVDKRVESKYGPPCPPCPAPEFLGGPSVFLFPPKPKDTLMISRTPEVTCVVVDVSQEDPEVQFNWYVDGVEVHNAKTKPREEQFNSTYRVVSVLTVLHQDWLNGKEYKCKVSNKGLPSSIEKTISKAKGQPREPQVYTLPPSQEEMTKNQVSLTCLVKGFYPSDIAVEWESNGQPENNYKTTPPVLDSDGSFFLYSRLTVDKSRWQEGNVFSCSVMHEALHNHYTQKSLSLSLGK

SEQ ID NO: 872 - protein, 214 aa, synthetic construct
  source 1..214: note = Nivolumab_Light_chain
EIVLTQSPATLSLSPGERATLSCRASQSVSSYLAWYQQKPGQAPRLLIYDASNRATGIPARFSGSGSGTDFTLTISSLEPEDFAVYYCQQSSNWPRTFGQGTKVEIKRTVAAPSVFIFPPSDEQLKSGTASVVCLLNNFYPREAKVQWKVDNALQSGNSQESVTEQDSKDSTYSLSSTLTLSKADYEKHKVYACEVTHQGLSSPVTKSFNRGEC

SEQ ID NO: 873 - protein, 447 aa, synthetic construct
  source 1..447: note = pembrolizumab_Heavy_chain
QVQLVQSGVEVKKPGASVKVSCKASGYTFTNYYMYWVRQAPGQGLEWMGGINPSNGGTNFNEKFKNRVTLTTDSSTTTAYMELKSLQFDDTAVYYCARRDYRFDMGFDYWGQGTTVTVSSASTKGPSVFPLAPCSRSTSESTAALGCLVKDYFPEPVTVSWNSGALTSGVHTFPAVLQSSGLYSLSSVVTVPSSSLGTKTYTCNVDHKPSNTKVDKRVESKYGPPCPPCPAPEFLGGPSVFLFPPKPKDTLMISRTPEVTCVVVDVSQEDPEVQFNWYVDGVEVHNAKTKPREEQFNSTYRVVSVLTVLHQDWLNGKEYKCKVSNKGLPSSIEKTISKAKGQPREPQVYTLPPSQEEMTKNQVSLTCLVKGFYPSDIAVEWESNGQPENNYKTTPPVLDSDGSFFLYSRLTVDKSRWQEGNVFSCSVMHEALHNHYTQKSLSLSLGK

SEQ ID NO: 874 - protein, 218 aa, synthetic construct
  source 1..218: note = pembrolizumab_Light_chain
EIVLTQSPATLSLSPGERATLSCRASKGVSTSGYSYLHWYQQKPGQAPRLLIYLASYLESGVPARFSGSGSGTDFTLTISSLEPEDFAVYYCQHSRDLPLTFGGGTKVEIKRTVAAPSVFIFPPSDEQLKSGTASVVCLLNNFYPREAKVQWKVDNALQSGNSQESVTEQDSKDSTYSLSSTLTLSKADYEKHKVYACEVTHQGLSSPVTKSFNRGEC

SEQ ID NO: 875 - protein, 452 aa, synthetic construct
  source 1..452: note = toripalimab_heavy_chain
QGQLVQSGAEVKKPGASVKVSCKASGYTFTDYEMHWVRQAPIHGLEWIGVIESETGGTAYNQKFKGRVTITADKSTSTAYMELSSLRSEDTAVYYCAREGITTVATTYYWYFDVWGQGTTVTVSSASTKGPSVFPLAPCSRSTSESTAALGCLVKDYFPEPVTVSWNSGALTSGVHTFPAVLQSSGLYSLSSVVTVPSSSLGTKTYTCNVDHKPSNTKVDKRVESKYGPPCPPCPAPEFLGGPSVFLFPPKPKDTLMISRTPEVTCVVVDVSQEDPEVQFNWYVDGVEVHNAKTKPREEQFNSTYRVVSVLTVLHQDWLNGKEYKCKVSNKGLPSSIEKTISKAKGQPREPQVYTLPPSQEEMTKNQVSLTCLVKGFYPSDIAVEWESNGQPENNYKTTPPVLDSDGSFFLYSRLTVDKSRWQEGNVFSCSVMHEALHNHYTQKSLSLSLGK

SEQ ID NO: 876 - protein, 219 aa, synthetic construct
  source 1..219: note = toripalimab_light_chain
DVVMTQSPLSLPVTLGQPASISCRSSQSIVHSNGNTYLEWYLQKPGQSPQLLIYKVSNRFSGVPDRFSGSGSGTDFTLKISRVEAEDVGVYYCFQGSHVPLTFGQGTKLEIKRTVAAPSVFIFPPSDEQLKSGTASVVCLLNNFYPREAKVQWKVDNALQSGNSQESVTEQDSKDSTYSLSSTLTLSKADYEKHKVYACEVTHQGLSSPVTKSFNRGEC

SEQ ID NO: 877 - protein, 447 aa, synthetic construct
  source 1..447: note = sintilimab_heavy_chain
QVQLVQSGAEVKKPGSSVKVSCKASGGTFSSYAISWVRQAPGQGLEWMGLIIPMFDTAGYAQKFQGRVAITVDESTSTAYMELSSLRSEDTAVYYCARAEHSSTGTFDYWGQGTLVTVSSASTKGPSVFPLAPCSRSTSESTAALGCLVKDYFPEPVTVSWNSGALTSGVHTFPAVLQSSGLYSLSSVVTVPSSSLGTKTYTCNVDHKPSNTKVDKRVESKYGPPCPPCPAPEFLGGPSVFLFPPKPKDTLMISRTPEVTCVVVDVSQEDPEVQFNWYVDGVEVHNAKTKPREEQFNSTYRVVSVLTVLHQDWLNGKEYKCKVSNKGLPSSIEKTISKAKGQPREPQVYTLPPSQEEMTKNQVSLTCLVKGFYPSDIAVEWESNGQPENNYKTTPPVLDSDGSFFLYSRLTVDKSRWQEGNVFSCSVMHEALHNHYTQKSLSLSLGK

SEQ ID NO: 878 - protein, 214 aa, synthetic construct
  source 1..214: note = sintilimab_light_chain
DIQMTQSPSSVSASVGDRVTITCRASQGISSWLAWYQQKPGKAPKLLISAASSLQSGVPSRFSGSGSGTDFTLTISSLQPEDFATYYCQQANHLPFTFGGGTKVEIKRTVAAPSVFIFPPSDEQLKSGTASVVCLLNNFYPREAKVQWKVDNALQSGNSQESVTEQDSKDSTYSLSSTLTLSKADYEKHKVYACEVTHQGLSSPVTKSFNRGEC

SEQ ID NO: 879 - protein, 444 aa, synthetic construct
  source 1..444: note = cemiplimab_heavy_chain
EVQLLESGGVLVQPGGSLRLSCAASGFTFSNFGMTWVRQAPGKGLEWVSGISGGGRDTYFADSVKGRFTISRDNSKNTLYLQMNSLKGEDTAVYYCVKWGNIYFDYWGQGTLVTVSSASTKGPSVFPLAPCSRSTSESTAALGCLVKDYFPEPVTVSWNSGALTSGVHTFPAVLQSSGLYSLSSVVTVPSSSLGTKTYTCNVDHKPSNTKVDKRVESKYGPPCPPCPAPEFLGGPSVFLFPPKPKDTLMISRTPEVTCVVVDVSQEDPEVQFNWYVDGVEVHNAKTKPREEQFNSTYRVVSVLTVLHQDWLNGKEYKCKVSNKGLPSSIEKTISKAKGQPREPQVYTLPPSQEEMTKNQVSLTCLVKGFYPSDIAVEWESNGQPENNYKTTPPVLDSDGSFFLYSRLTVDKSRWQEGNVFSCSVMHEALHNHYTQKSLSLSLGK

SEQ ID NO: 880 - protein, 214 aa, synthetic construct
  source 1..214: note = cemiplimab_light_chain
DIQMTQSPSSLSASVGDSITITCRASLSINTFLNWYQQKPGKAPNLLIYAASSLHGGVPSRFSGSGSGTDFTLTIRTLQPEDFATYYCQQSSNTPFTFGPGTVVDFRRTVAAPSVFIFPPSDEQLKSGTASVVCLLNNFYPREAKVQWKVDNALQSGNSQESVTEQDSKDSTYSLSSTLTLSKADYEKHKVYACEVTHQGLSSPVTKSFNRGEC

SEQ ID NO: 881 - protein, 443 aa, synthetic construct
  source 1..443: note = dostarlimab_heavy_chain
EVQLLESGGGLVQPGGSLRLSCAASGFTFSSYDMSWVRQAPGKGLEWVSTISGGGSYTYYQDSVKGRFTISRDNSKNTLYLQMNSLRAEDTAVYYCASPYYAMDYWGQGTTVTVSSASTKGPSVFPLAPCSRSTSESTAALGCLVKDYFPEPVTVSWNSGALTSGVHTFPAVLQSSGLYSLSSVVTVPSSSLGTKTYTCNVDHKPSNTKVDKRVESKYGPPCPPCPAPEFLGGPSVFLFPPKPKDTLMISRTPEVTCVVVDVSQEDPEVQFNWYVDGVEVHNAKTKPREEQFNSTYRVVSVLTVLHQDWLNGKEYKCKVSNKGLPSSIEKTISKAKGQPREPQVYTLPPSQEEMTKNQVSLTCLVKGFYPSDIAVEWESNGQPENNYKTTPPVLDSDGSFFLYSRLTVDKSRWQEGNVFSCSVMHEALHNHYTQKSLSLSLGK

SEQ ID NO: 882 - protein, 214 aa, synthetic construct
  source 1..214: note = dostarlimab_light_chain
DIQLTQSPSFLSAYVGDRVTITCKASQDVGTAVAWYQQKPGKAPKLLIYWASTLHTGVPSRFSGSGSGTEFTLTISSLQPEDFATYYCQHYSSYPWTFGQGTKLEIKRTVAAPSVFIFPPSDEQLKSGTASVVCLLNNFYPREAKVQWKVDNALQSGNSQESVTEQDSKDSTYSLSSTLTLSKADYEKHKVYACEVTHQGLSSPVTKSFNRGEC

SEQ ID NO: 883 - protein, 448 aa, synthetic construct
  source 1..448: note = penpulimab_heavy_chain
EVQLVESGGGLVQPGGSLRLSCAASGFAFSSYDMSWVRQAPGKGLDWVATISGGGRYTYYPDSVKGRFTISRDNSKNNLYLQMNSLRAEDTALYYCANRYGEAWFAYWGQGTLVTVSSASTKGPSVFPLAPSSKSTSGGTAALGCLVKDYFPEPVTVSWNSGALTSGVHTFPAVLQSSGLYSLSSVVTVPSSSLGTQTYICNVNHKPSNTKVDKKVEPKSCDKTHTCPPCPAPEAAGAPSVFLFPPKPKDTLMISRTPEVTCVVVDVSHEDPEVKFNWYVDGVEVHNAKTKPREEQYNSTYRVVSVLTVLHQDWLNGKEYKCKVSNKALPAPIEKTISKAKGQPREPQVYTLPPSRDELTKNQVSLTCLVKGFYPSDIAVEWESNGQPENNYKTTPPVLDSDGSFFLYSKLTVDKSRWQQGNVFSCSVMHEALHNHYTQKSLSLSPGK

SEQ ID NO: 884 - protein, 214 aa, synthetic construct
  source 1..214: note = penpulimab_light_chain
DIQMTQSPSSMSASVGDRVTFTCRASQDINTYLSWFQQKPGKSPKTLIYRANRLVSGVPSRFSGSGSGQDYTLTISSLQPEDMATYYCLQYDEFPLTFGAGTKLELKRTVAAPSVFIFPPSDEQLKSGTASVVCLLNNFYPREAKVQWKVDNALQSGNSQESVTEQDSKDSTYSLSSTLTLSKADYEKHKVYACEVTHQGLSSPVTKSFNRGEC

SEQ ID NO: 885 - protein, 443 aa, synthetic construct
  source 1..443: note = camrelizumab_heavy_chain
EVQLVESGGGLVQPGGSLRLSCAASGFTFSSYMMSWVRQAPGKGLEWVATISGGGANTYYPDSVKGRFTISRDNAKNSLYLQMNSLRAEDTAVYYCARQLYYFDYWGQGTTVTVSSASTKGPSVFPLAPCSRSTSESTAALGCLVKDYFPEPVTVSWNSGALTSGVHTFPAVLQSSGLYSLSSVVTVPSSSLGTKTYTCNVDHKPSNTKVDKRVESKYGPPCPPCPAPEFLGGPSVFLFPPKPKDTLMISRTPEVTCVVVDVSQEDPEVQFNWYVDGVEVHNAKTKPREEQFNSTYRVVSVLTVLHQDWLNGKEYKCKVSNKGLPSSIEKTISKAKGQPREPQVYTLPPSQEEMTKNQVSLTCLVKGFYPSDIAVEWESNGQPENNYKTTPPVLDSDGSFFLYSRLTVDKSRWQEGNVFSCSVMHEALHNHYTQKSLSLSLGK

SEQ ID NO: 886 - protein, 214 aa, synthetic construct
  source 1..214: note = camrelizumab_light_chain
DIQMTQSPSSLSASVGDRVTITCLASQTIGTWLTWYQQKPGKAPKLLIYTATSLADGVPSRFSGSGSGTDFTLTISSLQPEDFATYYCQQVYSIPWTFGGGTKVEIKRTVAAPSVFIFPPSDEQLKSGTASVVCLLNNFYPREAKVQWKVDNALQSGNSQESVTEQDSKDSTYSLSSTLTLSKADYEKHKVYACEVTHQGLSSPVTKSFNRGEC

SEQ ID NO: 887 - protein, 446 aa, synthetic construct
  source 1..446: note = tislelizumab_heavy_chain
QVQLQESGPGLVKPSETLSLTCTVSGFSLTSYGVHWIRQPPGKGLEWIGVIYADGSTNYNPSLKSRVTISKDTSKNQVSLKLSSVTAADTAVYYCARAYGNYWYIDVWGQGTTVTVSSASTKGPSVFPLAPCSRSTSESTAALGCLVKDYFPEPVTVSWNSGALTSGVHTFPAVLQSSGLYSLSSVVTVPSSSLGTKTYTCNVDHKPSNTKVDKRVESKYGPPCPPCPAPPVAGGPSVFLFPPKPKDTLMISRTPEVTCVVVAVSQEDPEVQENWYVDGVEVHNAKTKPREEQENSTYRVVSVLTVVHQDWLNGKEYKCKVSNKGLPSSIEKTISKAKGQPREPQVYTLPPSQEEMTKNQVSLTCLVKGFYPSDIAVEWESNGQPENNYKTTPPVLDSDGSFFLYSKLTVDKSRWQEGNVFSCSVMHEALHNHYTQKSLSLSLGIK

SEQ ID NO: 888 - protein, 214 aa, synthetic construct
  source 1..214: note = tislelizumab_light_chain
DIVMTQSPDSLAVSLGERATINCKSSESVSNDVAWYQQKPGQPPKLLINYAFHRFTGVPDRFSGSGYGTDFTLTISSLQAEDVAVYYCHQAYSSPYTFGQGTKLEIKRTVAAPSVFIFPPSDEQLKSGTASVVCLLNNFYPREAKVQWKVDNALQSGNSQESVTEQDSKDSTYSLSSTLTLSKADYEKHKVYACEVTHQGLSSPVTKSFNRGEC

SEQ ID NO: 889 - protein, 444 aa, synthetic construct
  source 1..444: note = spartalizumab_heavy_chain
EVQLVQSGAEVKKPGESLRISCKGSGYTFTTYWMHWVRQATGQGLEWMGNIYPGTGGSNFDEKEKNRVTITADKSTSTAYMELSSLRSEDTAVYYCTRWTTGTGAYWGQGTTVTVSSASTKGPSVFPLAPCSRSTSESTAALGCLVKDYFPEPVTVSWNSGALTSGVHTFPAVLQSSGLYSLSSVVTVPSSSLGTKTYTCNVDHKPSNTKVDKRVESKYGPPCPPCPAPEFLGGPSVFLFPPKPKDTLMISRTPEVTCVVVDVSQEDPEVQFNWYVDGVEVHNAKTKPREEQFNSTYRVVSVLTVLHQDWLNGKEYKCKVSNKGLPSSIEKTISKAKGQPREPQVYTLPPSQEEMTKNQVSLTCLVKGFYPSDIAVEWESNGQPENNYKTTPPVLDSDGSFFLYSRLTVDKSRWQEGNVFSCSVMHEALHNHYTQKSLSLSLQG

SEQ ID NO: 890 - protein, 220 aa, synthetic construct
  source 1..220: note = spartalizumab_light_chain
EIVLTQSPATLSLSPGERATLSCKSSQSLLDSGNQKNFLTWYQQKPGQAPRLLIYWASTRESGVPSRFSGSGSGTDFTETISSLEAEDAATYYCQNDYSYPYTFGQGTKVEIKRTVAAPSVFIFPPSDEQLKSGTASVVCLLNNFYPREAKVQWKVDNALQSGNSQESVTEQDSKDSTYSLSSTLTLSKADYEKHKVYACEVTHQGLSSPVTKSFNRGEC

SEQ ID NO: 891 - protein, 443 aa, synthetic construct
  source 1..443: note = serplulimab_heavy_chain
QVQLVESGGGLVKPGGSLRLSCAASGFTFSNYGMSWIRQAPGKGLEWVSTISGGGSNIYYADSVKGRFTISRDNAKNSLYLQMNSLRAEDTAVYYCVSYYYGIDFWGQGTSVTVSSASTKGPSVFPLAPCSRSTSESTAALGCLVKDYFPEPVTVSWNSGALTSGVHTFPAVLQSSGLYSLSSVVTVPSSSLGTKTYTCNVDHKPSNTKVDKRVESKYGPPCPPCPAPEFLGGPSVFLFPPKPKDTLMISRTPEVTCVVVDVSQEDPEVQFNWYVDGVEVHNAKTKPREEQFNSTYRVVSVLTVLHQDWLNGKEYKCKVSNKGLPSSIEKTISKAKGQPREPQVYTLPPSQEEMTKNQVSLTCLVKGFYPSDIAVEWESNGQPENNYKTTPPVLDSDGSFFLYSRLTVDKSRWQEGNVFSCSVMHEALHNHYTQKSLSLSLGK

SEQ ID NO: 892 - protein, 214 aa, synthetic construct
  source 1..214: note = serplulimab_light_chain
DIQMTQSPSSLSASVGDRVTITCKASQDVTTAVAWYQQKPGKAPKLLIYWASTRHTGVPSRFSGSGSGTDFTLTISSLQPEDFATYYCQQHYTIPWTFGGGTKLEIKRTVAAPSVFIFPPSDEQLKSGTASVVCLLNNFYPREAKVQWKVDNALQSGNSQESVTEQDSKDSTYSLSSTLTLSKADYEKHKVYACEVTHQGLSSPVTKSFNRGEC

SEQ ID NO: 893 - protein, 445 aa, synthetic construct
  source 1..445: note = retifanlimab_heavy_chain
QVQLVQSGAEVKKPGASVKVSCKASGYSFTSYWMNWVRQAPGQGLEWIGVIHPSDSETWLDQKFKDRVTITVDKSTSTAYMELSSLRSEDTAVYYCAREHYGTSPFAYWGQGTLVTVSSASTKGPSVFPLAPCSRSTSESTAALGCLVKDYFPEPVTVSWNSGALTSGVHTFPAVLQSSGLYSLSSVVTVPSSSLGTKTYTCNVDHKPSNTKVDKRVESKYGPPCPPCPAPEFLGGPSVFLFPPKPKDTLMISRTPEVTCVVVDVSQEDPEVQFNWYVDGVEVHNAKTKPREEQFNSTYRVVSVLTVLHQDWLNGKEYKCKVSNKGLPSSIEKTISKAKGQPREPQVYTLPPSQEEMTKNQVSLTCLVKGFYPSDIAVEWESNGQPENNYKTTPPVLDSDGSFFLYSRLTVDKSRWQEGNVFSCSVMHEALHNHYTQKSLSLSLG

SEQ ID NO: 894 - protein, 218 aa, synthetic construct
  source 1..218: note = retifanlimab_light_chain
EIVLTQSPATLSLSPGERATLSCRASESVDNYGMSFMNWFQQKPGQPPKLLIHAASNQGSGVPSRFSGSGSGTDFTLTISSLEPEDFAVYFCQQSKEVPYTFGGGTKVEIKRTVAAPSVFIFPPSDEQLKSGTASVVCLLNNFYPREAKVQWKVDNALQSGNSQESVTEQDSKDSTYSLSSTLTLSKADYEKHKVYACEVTHQGLSSPVTKSFNRGEC

SEQ ID NO: 895 - protein, 450 aa, synthetic construct
  source 1..450: note = zimberelimab_heavy_chain
QLQLQESGPGLVKPSETLTLTCTVSADSISSTTYYWVWIRQPPGKGLEWIGSISYSGSTYYNPSLKSRVTVSVDTSKNQFSLKLNSVAATDTALYYCARHLGYNGRYLPFDYWGQGTLVTVSSASTKGPSVFPLAPCSRSTSESTAALGCLVKDYFPEPVTVSWNSGALTSGVHTFPAVLQSSGLYSLSSVVTVPSSSLGTKTYTCNVDHKPSNTKVDKRVESKYGPPCPPCPAPEFLGGPSVFLFPPKPKDTLMISRTPEVTCVVVDVSQEDPEVQFNWYVDGVEVHNAKTKPREEQFNSTYRVVSVLTVLHQDWLNGKEYKCKVSNKGLPSSIEKTISKAKGQPREPQVYTLPPSQEEMTKNQVSLTCLVKGFYPSDIAVEWESNGQPENNYKTTPPVLDSDGSFFLYSRLTVDKSRWQEGNVFSCSVMHEALHNHYTQKSLSLSLGK

SEQ ID NO: 896 - protein, 216 aa, synthetic construct
  source 1..216: note = zimberelimab_light_chain
QSALTQPASVSGSPGQSITISCTGTSSDVGFYNYVSWYQQHPGKAPELMIYDVSNRPSGVSDRFSGSKSGNTASLTISGLQAEDEADYYCSSYTSISTWVFGGGTKLTVLGQPKAAPSVTLFPPSSEELQANKATLVCLISDFYPGAVTVAWKADSSPVKAGVETTTPSKQSNNKYAASSYLSLTPEQWKSHRSYSCQVTHEGSTVEKTVAPTECS

SEQ ID NO: 897 - protein, 440 aa, synthetic construct
  source 1..440: note = balstilimab_heavy_chain
QVQLVESGGGVVQPGRSLRLSCAASGFTFSSYGMHWVRQAPGKGLEWVAVIWYDGSNKYYADSVKGRFTISRDNSKNTLYLQMNSLRAEDTAVYYCASNGDHWGQGTLVTVSSASTKGPSVFPLAPCSRSTSESTAALGCLVKDYFPEPVTVSWNSGALTSGVHTFPAVLQSSGLYSLSSVVTVPSSSLGTKTYTCNVDHKPSNTKVDKRVESKYGPPCPPCPAPEFLGGPSVFLFPPKPKDTLMISRTPEVTCVVVDVSQEDPEVQFNWYVDGVEVHNAKTKPREEQFNSTYRVVSVLTVLHQDWLNGKEYKCKVSNKGLPSSIEKTISKAKGQPREPQVYTLPPSQEEMTKNQVSLTCLVKGFYPSDIAVEWESNGQPENNYKTTPPVLDSDGSFFLYSRLTVDKSRWQEGNVFSCSVMHEALHNHYTQKSLSLSLGK

SEQ ID NO: 898 - protein, 214 aa, synthetic construct
  source 1..214: note = balstilimab_light_chain
EIVMTQSPATLSVSPGERATLSCRASQSVSSNLAWYQQKPGQAPRLLIYGASTRATGIPARFSGSGSGTEFTLTISSLQSEDFAVYYCQQYNNWPRTFGQGTKVEIKRTVAAPSVFIFPPSDEQLKSGTASVVCLLNNFYPREAKVQWKVDNALQSGNSQESVTEQDSKDSTYSLSSTLTLSKADYEKHKVYACEVTHQGLSSPVTKSFNRGEC

SEQ ID NO: 899 - protein, 459 aa, synthetic construct
  source 1..459: note = prolgolimab_heavy_chain
QVQLVQSGGGLVQPGGSLRLSCAASGFTFSSYWMYWVRQVPGKGLEWVSAIDTGGGRTYYADSVKGRFAISRVNAKNTMYLQMNSLRAEDTAVYYCARDEGGGTGWGVLKDWPYGLDAWGQGTLVTVSSASTKGPSVFPLAPSSKSTSGGTAALGCLVKDYFPEPVTVSWNSGALTSGVHTFPAVLQSSGLYSLSSVVTVPSSSLGTQTYICNVNHKPSNTKVDKRVEPKSCDKTHTCPPCPAPEAAGGPSVFLFPPKPKDTLMISRTPEVTCVVVDVSHEDPEVKFNWYVDGVEVHNAKTKPREEQYNSTYRVVSVLTVLHQDWLNGKEYKCKVSNKALPAPIEKTISKAKGQPREPQVYTLPPSREEMTKNQVSLTCLVKGFYPSDIAVEWESNGQPENNYKTTPPVLDSDGSFFLYSKLTVDKSRWQQGNVFSCSVMHEALHNHYTQKSLSLSPGK

SEQ ID NO: 900 - protein, 214 aa, synthetic construct
  source 1..214: note = prolgolimab_light_chain
QPVLTQPLSVSVALGQTARITCGGNNIGSKNVHWYQQKPGQAPVLVIYRDSNRPSGIPERFSGSNSGNTATLTISRAQAGDEADYYCQVWDSSTAVFGTGTKLTVLQRTVAAPSVFIFPPSDEQLKSGTASVVCLLNNFYPREAKVQWKVDNALQSGNSQESVTEQDSKDSTYSLSSTLTLSKADYEKHKVYACEVTHQGLSSPVTKSFNRGEC

SEQ ID NO: 901 - protein, 447 aa, synthetic construct
  source 1..447: note = pidilizumab_heavy_chain
QVQLVQSGSELKKPGASVKISCKASGYTFTNYGMNWVRQAPGQGLQWMGWINTDSGESTYAEEFKGRFVFSLDTSVNTAYLQITSLTAEDTGMYFCVRVGYDALDYWGQGTLVTVSSASTKGPSVFPLAPSSKSTSGGTAALGCLVKDYFPEPVTVSWNSGALTSGVHTFPAVLQSSGLYSLSSVVTVPSSSLGTQTYICNVNHKPSNTKVDKRVEPKSCDKTHTCPPCPAPELLGGPSVFLFPPKPKDTLMISRTPEVTCVVVDVSHEDPEVKFNWYVDGVEVHNAKTKPREEQYNSTYRVVSVLTVLHQDWLNGKEYKCKVSNKALPAPIEKTISKAKGQPREPQVYTLPPSREEMTKNQVSLTCLVKGFYPSDIAVEWESNGQPENNYKTTPPVLDSDGSFFLYSKLTVDKSRWQQGNVFSCSVMHEALHNHYTQKSLSLSPGK

SEQ ID NO: 902 - protein, 213 aa, synthetic construct
  source 1..213: note = pidilizumab_light_chain
EIVLTQSPSSLSASVGDRVTITCSARSSVSYMHWFQQKPGKAPKLWIYRTSNLASGVPSRFSGSGSGTSYCLTINSLQPEDFATYYCQQRSSFPLTFGGGTKLEIKRTVAAPSVFIFPPSDEQLKSGTASVVCLLNNFYPREAKVQWKVDNALQSGNSQESVTEQDSKDSTYSLSSTLTLSKADYEKHKVYACEVTHQGLSSPVTKSFNRGEC

SEQ ID NO: 903 - protein, 446 aa, synthetic construct
  source 1..446: note = ezabenlimab_heavy_chain
EVMLVESGGGLVQPGGSLRLSCTASGFTFSKSAMSWVRQAPGKGLEWVAYISGGGGDTYYSSSVKGRFTISRDNAKNSLYLQMNSLRAEDTAVYYCARHSNVNYYAMDYWGQGTLVTVSSASTKGPSVFPLAPCSRSTSESTAALGCLVKDYFPEPVTVSWNSGALTSGVHTFPAVLQSSGLYSLSSVVTVPSSSLGTKTYTCNVDHKPSNTKVDKRVESKYGPPCPPCPAPEFLGGPSVFLFPPKPKDTLMISRTPEVTCVVVDVSQEDPEVQFNWYVDGVEVHNAKTKPREEQFNSTYRVVSVLTVLHQDWLNGKEYKCKVSNKGLPSSIEKTISKAKGQPREPQVYTLPPSQEEMTKNQVSLTCLVKGFYPSDIAVEWESNGQPENNYKTTPPVLDSDGSFFLYSRLTVDKSRWQEGNVFSCSVMHEALHNHYTQKSLSLSLG

SEQ ID NO: 904 - protein, 218 aa, synthetic construct
  source 1..218: note = ezabenlimab_light_chain
EIVLTQSPATLSLSPGERATMSCRASENIDVSGISFMNWYQQKPGQAPKLLIYVASNQGSGIPARFSGSGSGTDFTLTISRLEPEDFAVYYCQQSKEVPWTFGQGTKLEIKRTVAAPSVFIFPPSDEQLKSGTASVVCLLNNFYPREAKVQWKVDNALQSGNSQESVTEQDSKDSTYSLSSTLTLSKADYEKHKVYACEVTHQGLSSPVTKSFNRGEC

SEQ ID NO: 905 - protein, 440 aa, synthetic construct
  source 1..440: note = geptanolimab_heavy_chain
QIQLVQSGSELKKPGASVKVSCKASGYTFTNFGMNWVRQAPGQGLKWMGWISGYTREPTYAADFKGRFVISLDTSVSTAYLQISSLKAEDTAVYYCARDVFDYWGQGTLVTVSSASTKGPSVFPLAPCSRSTSESTAALGCLVKDYFPEPVTVSWNSGALTSGVHTFPAVLQSSGLYSLSSVVTVPSSSLGTKTYTCNVDHKPSNTKVDKRVESKYGPPCPPCPAPEFLGGPSVFLFPPKPKDTLMISRTPEVTCVVVDVSQEDPEVQFNWYVDGVEVHNAKTKPREEQFNSTYRVVSVLTVLHQDWLNGKEYKCKVSNKGLPSSIEKTISKAKGQPREPQVYTLPPSQEEMTKNQVSLTCLVKGFYPSDIAVEWESNGQPENNYKTTPPVLDSDGSFFLYSRLTVDKSRWQEGNVFSCSVMHEALHNHYTQKSLSLSLG

SEQ ID NO: 906 - protein, 217 aa, synthetic construct
  source 1..217: note = geptanolimab_light_chain
DIVLTQSPASLAVSPGQRATITCRASESVDNYGYSFMNWFQQKPGQPPKLLIYRASNLESGVPARFSGSGSRTDFTLTINPVEADDTANYYCQQSNADPTFGQGTKLEIKRTVAAPSVFIFPPSDEQLKSGTASVVCLLNNFYPREAKVQWKVDNALQSGNSQESVTEQDSKDSTYSLSSTLTLSKADYEKHKVYACEVTHQGLSSPVTKSFNRGEC

SEQ ID NO: 907 - protein, 444 aa, synthetic construct
  source 1..444: note = sasanlimab_heavy_chain
QVQLVQSGAEVKKPGASVKVSCKASGYTFTSYWINWVRQAPGQGLEWMGNIYPGSSLTNYNEKFKNRVTMTRDTSTSTVYMELSSLRSEDTAVYYCARLSTGTFAYWGQGTLVTVSSASTKGPSVFPLAPCSRSTSESTAALGCLVKDYFPEPVTVSWNSGALTSGVHTFPAVLQSSGLYSLSSVVTVPSSSLGTKTYTCNVDHKPSNTKVDKRVESKYGPPCPPCPAPEFLGGPSVFLFPPKPKDTLMISRTPEVTCVVVDVSQEDPEVQFNWYVDGVEVHNAKTKPREEQFNSTYRVVSVLTVLHQDWLNGKEYKCKVSNKGLPSSIEKTISKAKGQPREPQVYTLPPSQEEMTKNQVSLTCLVKGFYPSDIAVEWESNGQPENNYKTTPPVLDSDGSFFLYSRLTVDKSRWQEGNVFSCSVMHEALHNHYTQKSLSLSLGK

SEQ ID NO: 908 - protein, 220 aa, synthetic construct
  source 1..220: note = sasanlimab_light_chain
DIVMTQSPDSLAVSLGERATINCKSSQSLWDSGNQKNFLTWYQQKPGQPPKLLIYWTSYRESGVPDRFSGSGSGTDFTLTISSLQAEDVAVYYCQNDYFYPHTFGGGTKVEIKRTVAAPSVFIFPPSDEQLKSGTASVVCLLNNFYPREAKVQWKVDNALQSGNSQESVTEQDSKDSTYSLSSTLTLSKADYEKHKVYACEVTHQGLSSPVTKSFNRGEC

SEQ ID NO: 909 - protein, 445 aa, synthetic construct
  source 1..445: note = pimivalimab_heavy_chain
QVQLVQSGAEVKKPGASVKVSCKASGYTFPSYYMHWVRQAPGQGLEWMGIINPEGGSTAYAQKFQGRVTMTRDTSTSTVYMELSSLRSEDTAVYYCARGGTYYDYTYWGQGTLVTVSSASTKGPSVFPLAPCSRSTSESTAALGCLVKDYFPEPVTVSWNSGALTSGVHTFPAVLQSSGLYSLSSVVTVPSSSLGTKTYTCNVDHKPSNTKVDKRVESKYGPPCPPCPAPEFLGGPSVFLFPPKPKDTLMISRTPEVTCVVVDVSQEDPEVQFNWYVDGVEVHNAKTKPREEQFNSTYRVVSVLTVLHQDWLNGKEYKCKVSNKGLPSSIEKTISKAKGQPREPQVYTLPPSQEEMTKNQVSLTCLVKGFYPSDIAVEWESNGQPENNYKTTPPVLDSDGSFFLYSRLTVDKSRWQEGNVFSCSVMHEALHNHYTQKSLSLSLGK

SEQ ID NO: 910 - protein, 214 aa, synthetic construct
  source 1..214: note = pimivalimab_light_chain
DIQMTQSPSTLSASVGDRVTITCRASQSISSWLAWYQQKPGKAPKLLIYEASSLESGVPSRFSGSGSGTEFTLTISSLQPDDFATYYCQQYNSFPPTFGGGTKVEIKRTVAAPSVFIFPPSDEQLKSGTASVVCLLNNFYPREAKVQWKVDNALQSGNSQESVTEQDSKDSTYSLSSTLTLSKADYEKHKVYACEVTHQGLSSPVTKSFNRGEC

SEQ ID NO: 911 - protein, 121 aa, synthetic construct
  source 1..121: note = 1D7B4[NKG2D]_H1_vh
EVQLLESGGGLVQPGGSLRLSCAASGFTFSSYAMSWVRQAPGKGLEWVSSISASGGSTYYADSVKGRFTISRDNSKNTLYLQMNSLRAEDTAVYYCAKGIFSIYFFYFDYWGQGTLVTVSS

SEQ ID NO: 912 - protein, 5 aa, synthetic construct
  source 1..5: note = 1D7B4[NKG2D]_H1_vhCDR1
SYAMS

SEQ ID NO: 913 - protein, 17 aa, synthetic construct
  source 1..17: note = 1D7B4[NKG2D]_H1_vhCDR2
SISASGGSTYYADSVKG

SEQ ID NO: 914 - protein, 12 aa, synthetic construct
  source 1..12: note = 1D7B4[NKG2D]_H1_vhCDR3
GIFSIYFFYFDY

SEQ ID NO: 915 - protein, 107 aa, synthetic construct
  source 1..107: note = 1D7B4[NKG2D]_L1_vl
DIQMTQSPSSLSASVGDRVTITCRASQSISSYLNWYQQKPGKAPKLLIYAASSLQSGVPSRFSGSGSGTDFTLTISSLQPEDFATYYCQQSYSTPYTFGQGTKLEIK

SEQ ID NO: 916 - protein, 11 aa, synthetic construct
  source 1..11: note = 1D7B4[NKG2D]_L1_vlCDR1
RASQSISSYLN

SEQ ID NO: 917 - protein, 7 aa, synthetic construct
  source 1..7: note = 1D7B4[NKG2D]_L1_vlCDR2
AASSLQS

SEQ ID NO: 918 - protein, 9 aa, synthetic construct
  source 1..9: note = 1D7B4[NKG2D]_L1_vlCDR3
QQSYSTPYT

SEQ ID NO: 919 - protein, 121 aa, synthetic construct
  source 1..121: note = 1D2B4[NKG2D]_H0_vh
EVQLLESGGGLVQPGGSLRLSCAASGFTFSSFGMSWVRQAPGKGLEWVSTISGSGSTTYYADSVKGRFTISRDNSKNTLYLQMNSLRAEDTAVYYCAKGVFSEWHYYFDYWGQGTLVTVSS

SEQ ID NO: 920 - protein, 5 aa, synthetic construct
  source 1..5: note = 1D2B4[NKG2D]_H0_vhCDR1
SFGMS

SEQ ID NO: 921 - protein, 17 aa, synthetic construct
  source 1..17: note = 1D2B4[NKG2D]_H0_vhCDR2
TISGSGSTTYYADSVKG

SEQ ID NO: 922 - protein, 12 aa, synthetic construct
  source 1..12: note = 1D2B4[NKG2D]_H0_vhCDR3
GVFSEWHYYFDY

SEQ ID NO: 923 - protein, 107 aa, synthetic construct; identical to SEQ ID NO: 915
  source 1..107: note = 1D2B4[NKG2D]_L0_vl

SEQ ID NO: 924 - protein, 11 aa, synthetic construct
  source 1..11: note = 1D2B4[NKG2D]_L0_vlCDR1
RASQSISSYLN

SEQ ID NO: 925 - protein, 7 aa, synthetic construct
  source 1..7: note = 1D2B4[NKG2D]_L0_vlCDR2
AASSLQS

SEQ ID NO: 926 - protein, 9 aa, synthetic construct
  source 1..9: note = 1D2B4[NKG2D]_L0_vlCDR3
QQSYSTPYT

SEQ ID NO: 927 - protein, 120 aa, synthetic construct
  source 1..120: note = mAb-C[NKG2D]_H0_vh
QVQLVQSGAEVKKPGASVKVSCKVSGFSLTIYGVHWVRQAPGQGLEWMGVIWSGGSTDYNAKFQGRVTMTKDNSKRTVYMELSSLRSEDTAVYYCSRKSHDGYYGVMDYWGQGTTVTVSS

SEQ ID NO: 928 - protein, 5 aa, synthetic construct
  source 1..5: note = mAb-C[NKG2D]_H0_vhCDR1
IYGVH

SEQ ID NO: 929 - protein, 16 aa, synthetic construct
  source 1..16: note = mAb-C[NKG2D]_H0_vhCDR2
VIWSGGSTDYNAKFQG

SEQ ID NO: 930 - protein, 12 aa, synthetic construct
  source 1..12: note = mAb-C[NKG2D]_H0_vhCDR3
KSHDGYYGVMDY

SEQ ID NO: 931 - protein, 107 aa, synthetic construct
  source 1..107: note = mAb-C[NKG2D]_L0_vl
DIQLTQSPDFQSVTPKEKVTITCRASQSIGTSIHWYQQKPDQSPKLLIKYASESISGIPSRFSGSGSGTDFTLTINSLEAEDAATYYCQQSNTWPLTFGAGTKVEIK

SEQ ID NO: 932 - protein, 11 aa, synthetic construct
  source 1..11: note = mAb-C[NKG2D]_L0_vlCDR1
RASQSIGTSIH

SEQ ID NO: 933 - protein, 7 aa, synthetic construct
  source 1..7: note = mAb-C[NKG2D]_L0_vlCDR2
YASESIS

SEQ ID NO: 934 - protein, 9 aa, synthetic construct
  source 1..9: note = mAb-C[NKG2D]_L0_vlCDR3
QQSNTWPLT

SEQ ID NO: 935 - protein, 122 aa, synthetic construct
  source 1..122: note = mAb-D[NKG2D]_H0_vh
QVQLVQSGAEVKKPGASVKVSCKASGYTFTNYWMHWVRQAPGQGLEWMGEIDPSDIYTNYAQKFQGRVTMTRDTSTSTVYMELSSLRSEDTAVYYCARGIYDGYYVYGMDYWGQGTTVTVSS

SEQ ID NO: 936 - protein, 5 aa, synthetic construct
  source 1..5: note = mAb-D[NKG2D]_H0_vhCDR1
NYWMH

SEQ ID NO: 937 - protein, 16 aa, synthetic construct
  source 1..16: note = mAb-D[NKG2D]_H0_vhCDR2
EIDPSDIYTNYAQKFQ

SEQ ID NO: 938 - protein, 13 aa, synthetic construct
  source 1..13: note = mAb-D[NKG2D]_H0_vhCDR3
GIYDGYYVYGMDY

SEQ ID NO: 939 - protein, 107 aa, synthetic construct
  source 1..107: note = mAb-D[NKG2D]_L0_vl
YIQMTQSPSSLSASVGDRVTITCRSSQDISNYLNWYQQKPGKAPKLLIYYTSRLHSGVPSRFSGSGSGTDFTFTISSLQPEDIATYYCQQGKTLPRTFGGGTKVEIK

SEQ ID NO: 940 - protein, 11 aa, synthetic construct
  source 1..11: note = mAb-D[NKG2D]_L0_vlCDR1
RSSQDISNYLN

SEQ ID NO: 941 - protein, 7 aa, synthetic construct
  source 1..7: note = mAb-D[NKG2D]_L0_vlCDR2
YTSRLHS

SEQ ID NO: 942 - protein, 9 aa, synthetic construct
  source 1..9: note = mAb-D[NKG2D]_L0_vlCDR3
QQGKTLPRT

SEQ ID NO: 943 - protein, 118 aa, synthetic construct
  source 1..118: note = 5C5_vh
EVQLLESGGGLVQPGGSLRLSCAASGFTFSSYAMSWVRQAPGKGLEWVSAISGSGGSTYYADSVKGRFTISRDNSKNTLYLQMNSLRAEDTAVYYCAKELYREYMDYWGQGTLVTVSS

SEQ ID NO: 944 - protein, 109 aa, synthetic construct
  source 1..109: note = 5C5_vl
SSELTQDPAVSVALGQTVRITCQGDSLRSYYASWYQQKPGQAPVLVIYGKNNRPSGIPDRFSGSSSGNTASLTITGAQAEDEADYYCNSRDSFSIHQNVFGGGTKLTVL

SEQ ID NO: 945 - protein, 119 aa, synthetic construct
  source 1..119: note = 13C6_vh
EVQLVQSGAEVKKPGESLKISCKGSGYSFTSYWIGWVRQMPGKGLEWMGIIYPGDSDTRYSPSFQGQVTISADKSISTAYLQWSSLKASDTAMYYCARLYPVGVYFDYWGQGTLVTVSS

SEQ ID NO: 946 - protein, 106 aa, synthetic construct
  source 1..106: note = 13C6_vl
DIQMTQSPSTLSASVGDRVTITCRASQSISSWLAWYQQKPGKAPKLLIYDASSLESGVPSRFSGSGSGTEFTLTISSLQPDDFATYYCQQYWSYWMFGQGTKVEIK

SEQ ID NO: 947 - protein, 121 aa, synthetic construct
  source 1..121: note = 001_vh
QQLEQSGGGLVTPGGSLKLCCIGSGFDFNTYWMTWVRQAPGKGLEWIGCIHGGSSGSTYYASWVNGRFTLSRDIDQSTGCLQVNSLTAADTAMYYCARPGYRSWSKTFDLWGQGTMVTVSS

SEQ ID NO: 948 - protein, 107 aa, synthetic construct
  source 1..107: note = 001_vl
DIQMTQSPSSLSASVGDRVTITCRASQDISESLNWYQQKPGKAPKLLIYAASSLQSGVPSRFSGSGSGTDYTLTISSLQPEDFATYYCQQANSFPLTFGGGTKVEIK

SEQ ID NO: 949 - protein, 121 aa, synthetic construct
  source 1..121: note = 013_vh
EQSGGGAGGGLVKPGGSLELCCKASGFDFSIYWMSWVRQSPGKGLEWIGRIYGGSSDYTAYASWVNGRFTLSRDIDQSTGCLQLNSLTAADTAMYYCVRLNPSFSRSFDYWGQGTLVTVSS

SEQ ID NO: 950 - protein, 107 aa, synthetic construct
  source 1..107: note = 013_vl
DIQMTQSPSSVSASVGDRVTITCRASQGIFSWLVWYQQKPGKAPELLMYGASTLQSGVPSRFSGSGSGTDFTLTISSLQPEDFATYYCQQGYSTPYTFGQGTKVEIK

SEQ ID NO: 951 - protein, 123 aa, synthetic construct
  source 1..123: note = 014_vh
EVQLLESGGGLVQPGGSLRLSCAASGFTFSSYAMSWVRQAPGKGLEWVSRISDGGGTIYYTDSVKGRFTIARDNSKNTLYLEMKSLRAEDTAVYYCAKHRLYDSIGAYAMDVWGQGTTVAVSS

SEQ ID NO: 952 - protein, 107 aa, synthetic construct
  source 1..107: note = 014_vl
DIQMTQSPSSLSASVGDRVTITCRASQSISSYLNWYQQKPGKAPKLLIYDASNLETGVPSRFSGSGSGTDFTLTISSLQPEDFATYYCQQANSFPLTFGPGTKVDIK

SEQ ID NO: 953 - protein, 121 aa, synthetic construct
  source 1..121: note = 018_vh
QQLEQSGGGLVTPGGSLKVCCKASGFDFTTYWMTWVRQAPEKGLEWIGCIHGGDSGATYYANWVNGRFTLSRDIDQSTGCLQLNSLTAADTAMYYCARPGYPSWSKTFDLWGQGTMVTVSS

SEQ ID NO: 954 - protein, 107 aa, synthetic construct
  source 1..107: note = 018_vl
DIQMTQSPSSLSASVGDRVTITCQASQDISNALNWYQQKPGKAPKLLIYAASTLQSGVPSRFSGSGSGTDFTLTISSLQPEDFATYYCQHSNSFPLTFGGGTKVEIK

SEQ ID NO: 955 - protein, 121 aa, synthetic construct
  source 1..121: note = 230_vh
QQLEQSGGGLVKPGGSLELCCIASGFDFSTYWMTWVRQAPGKGLEWIGCIHGGGSGTTSYASWVNGRFTLSRDIDQSTGCLQLTSLTAADTAMYYCARPGYRSWSKTFDLWGQGTMVTVSS

SEQ ID NO: 956 - protein, 107 aa, synthetic construct
  source 1..107: note = 230_vl
DIQMTQSPSSLSASVGDRVTITCQANQDISNALNWYQQKPGKAPKLLIYAASSLQSGVPSRFSGSGSGTDFTLTISSLQPEDFAAYYCQQAASFPLTFGGGTKVEIK

SEQ ID NO: 957 - protein, 121 aa, synthetic construct
  source 1..121: note = 296_vh
EVQLLESGGGLVQPGGSLRLSCAASGFTFSSYAMSWVRQAPGKGLEWVSAIGIGGGGTYYADSVKGRFTISRDNSKNTLYLQMNSLRAEDTAVYHCAKGASFDFINFFPYWGQGTLVTVSS

SEQ ID NO: 958 - protein, 107 aa, synthetic construct
  source 1..107: note = 296_vl
DIQMTQSPSSLSASVGDRVTITCRASQGISNDLAWYQQKPGKAPKLLIYAASSLQSGVPSRFSGSGSGTDFTLTISSLQPEDFATYYCQQTYSTPLTFGGGTKVEIK

SEQ ID NO: 959 - protein, 121 aa, synthetic construct
  source 1..121: note = 320_vh
EVQLLESGGGLVQPGGSLRLSCATSGFTFSDYAMSWVRQAPGKGLEWVSYNSFSVGSTDYADSVKGRFTISRDNSKNTLYLQMNSLRAEDTAVYYCSKHSGNYYTGPFHYWGQGTLVTVSS

SEQ ID NO: 960 - protein, 107 aa, synthetic construct
  source 1..107: note = 320_vl
DIQLTQSPSFLSASVGDRVTITCRASQGISSYLAWYQQKPGKAPKLLIYAASSLESGVPSRFSGSGSGTDFTLTISSLQPEDFATYYCQQSYSTPITFGQGTRLEIK

SEQ ID NO: 961 - protein, 121 aa, synthetic construct
  source 1..121: note = 395_vh
QEQLEQSGGGLVTPGGSLKLCCTASGFDFNTFWMTWVRQAPGKGLEWIGCIHGGSGSRDYASWVNGRFTLSRDIDQSTACLQVNSLTAADTAMYYCARPGYRSWSKTFDLWGQGTMVTVSS

SEQ ID NO: 962 - protein, 107 aa, synthetic construct
  source 1..107: note = 395_vl
DIQMTQSPSSLSASVGDRVTITCRASQDISGALNWYQQKPGKAPNLLIYAASSLQSGVPSRFSGSGSGTDYTLTISSLQPEDFATYYCQQANSFPLTFGGGTKVEIK

SEQ ID NO: 963 - protein, 121 aa, synthetic construct
  source 1..121: note = P1A34972_vh
QEQLEQSGGGLVTPGGSLKLCCTASGFDFNTFWMTWVRQAPGKGLEWIGSIHGGSGSRDYASWVNGRFTLSRDIDQSTACLQVNSLTAADTAMYYCARPGYRSWSKTFDLWGQGTMVTVSS

SEQ ID NO: 964 - protein, 107 aa, synthetic construct; identical to SEQ ID NO: 962
  source 1..107: note = P1A34972_vl

SEQ ID NO: 965 - protein, 121 aa, synthetic construct
  source 1..121: note = P1AE4973_vh
EVQLLESGGGLVQPGGSLRLSCAASGFDFNTFWMTWVRQAPGKGLEWVGSIHGGSGSRDYADSVKGRFTISRDNSKNTLYLQMNSLRAEDTAVYYCARPGYRSWSKTFDLWGQGTTVTVSS

SEQ ID NO: 966 - protein, 107 aa, synthetic construct; identical to SEQ ID NO: 962
  source 1..107: note = P1AE4973_vl

SEQ ID NO: 967 - protein, 121 aa, synthetic construct
  source 1..121: note = P1A34975_vh
EVQLLESGGGLVQPGGSLRLSCAASGFDFNTFWMTWVRQAPGKGLEWVGSIHGGSGSRDYADSVKGRFTISRDNSKNTAYLQMNSLRAEDTAVYYCARPGYRSWSKTFDLWGQGTTVTVSS

SEQ ID NO: 968 - protein, 107 aa, synthetic construct; identical to SEQ ID NO: 962
  source 1..107: note = P1A34975_vl

SEQ ID NO: 969 - protein, 121 aa, synthetic construct
  source 1..121: note = P1AE4977_vh
EVQLLESGGGLVQPGGSLRLSCAASGFDFNTFWMTWVRQAPGKGLEWVGSIHGGSGSRDYADSVKGRFTISRDIDQSTAYLQMNSLRAEDTAVYYCARPGYRSWSKTFDLWGQGTTVTVSS

SEQ ID NO: 970 - protein, 107 aa, synthetic construct; identical to SEQ ID NO: 962
  source 1..107: note = P1AE4977_vl

SEQ ID NO: 971 - protein, 121 aa, synthetic construct
  source 1..121: note = P1AE4978_vh
EVQLVESGGGLVQPGGSLRLSCAASGFDFNTFWMTWVRQAPGKGLEWVGSIHGGSGSRDYADSVKGRFTISADIDQSTAYLQMNSLRAEDTAVYYCARPGYRSWSKTFDLWGQGTTVTVSS

SEQ ID NO: 972 - protein, 107 aa, synthetic construct; identical to SEQ ID NO: 962
  source 1..107: note = P1AE4978_vl

SEQ ID NO: 973 - protein, 121 aa, synthetic construct
  source 1..121: note = P1AE4979_vh
QEQLLESGGGLVQPGGSLRLSCAASGFDFNTFWMTWVRQAPGKGLEWVGSIHGGSGSRDYADSVKGRFTISRDIDQSTAYLQMNSLRAEDTAVYYCARPGYRSWSKTFDLWGQGTTVTVSS

SEQ ID NO: 974 - protein, 121 aa, synthetic construct
  source 1..121: note = P1AE4980_vh
QEQLVQSGAEVKKPGESLKISCKGSGFDFNTFWMTWVRQMPGKGLEWMGSIHGGSGSRDYSPSFQGQVTISADIDQSTAYLQWSSLKASDTAMYYCARPGYRSWSKTFDLWGQGTTVTVSS

SEQ ID NO: 975 - protein, 107 aa, synthetic construct; identical to SEQ ID NO: 962
  source 1..107: note = P1AE4980_vl

SEQ ID NO: 976 - protein, 121 aa, synthetic construct
  source 1..121: note = P1AE4981_vh
QEQLQESGPGLVKPSETLSLTCTVSGFDFNTFWMTWIRQPPGKGLEWIGSIHGGSGSRDYNPSLKSRVTISVDIDQNQFSLKLSSVTAADTAVYYCARPGYRSWSKTFDLWGQGTTVTVSS

SEQ ID NO: 977 - protein, 107 aa, synthetic construct; identical to SEQ ID NO: 962
  source 1..107: note = P1AE4981_vl

SEQ ID NO: 978 - protein, 117 aa, synthetic construct
  source 1..117: note = ADI-27705_vh
QVQLQQWGAGLLKPSETLSLTCAVYGGSFSGYYWSWIRQPPGKGLEWIGEIDHSGSTNYNPSLKSRVTISVDTSKNQFSLKLSSVTAADTAVYYCARARGPWSFDPWGQGTLVTVSS

SEQ ID NO: 979 - protein, 107 aa, synthetic construct
  source 1..107: note = ADI-27705_vl
DIQMTQSPSTLSASVGDRVTITCRASQSISSWLAWYQQKPGKAPKLLIYKASSLESGVPSRFSGSGSGTEFTLTISSLQPDDFATYYCQQYNSYPITFGGGTKVEIK

SEQ ID NO: 980 - protein, 117 aa, synthetic construct; identical to SEQ ID NO: 978
  source 1..117: note = ADI-27724_vh

SEQ ID NO: 981 - protein, 108 aa, synthetic construct
  source 1..108: note = ADI-27724_vl
EIVLTQSPGTLSLSPGERATLSCRASQSVSSSYLAWYQQKPGQAPRLLIYGASSRATGIPDRFSGSGSGTDFTLTISRLEPEDFAVYYCQQYGSSPITFGGGTKVEIK

SEQ ID NO: 982 - protein, 117 aa, synthetic construct; identical to SEQ ID NO: 978
  source 1..117: note = ADI-27740_vh

SEQ ID NO: 983 - protein, 106 aa, synthetic construct
  source 1..106: note = ADI-27740_vl
DIQMTQSPSTLSASVGDRVTITCRASQSIGSWLAWYQQKPGKAPKLLIYKASSLESGVPSRFSGSGSGTEFTLTISSLQPDDFATYYCQQYHSFYTFGGGTKVEIK

SEQ ID NO: 984 - protein, 117 aa, synthetic construct; identical to SEQ ID NO: 978
  source 1..117: note = ADI-22741_vh

SEQ ID NO: 985 - protein, 106 aa, synthetic construct
  source 1..106: note = ADI-22741_vl
DIQMTQSPSTLSASVGDRVTITCRASQSIGSWLAWYQQKPGKAPKLLIYKASSLESGVPSRFSGSGSGTEFTLTISSLQPDDFATYYCQQSNSYYTFGGGTKVEIK

SEQ ID NO: 986 - protein, 117 aa, synthetic construct; identical to SEQ ID NO: 978
  source 1..117: note = ADI-27743_vh

SEQ ID NO: 987 - protein, 106 aa, synthetic construct
  source 1..106: note = ADI-27743_vl
DIQMTQSPSTLSASVGDRVTITCRASQSISSWLAWYQQKPGKAPKLLIYKASSLESGVPSRFSGSGSGTEFTLTISSLQPDDFATYYCQQYNSYPTFGGGTKVEIK

SEQ ID NO: 988 - protein, 117 aa, synthetic construct
  source 1..117: note = ADI-28153_vh
QVQLQQWGAGLLKPSETLSLTCAVYGGSFSGYYWSWIRQPPGKGLEWIGEIDHSGSTNYNPSLKSRVTISVDTSKNQFSLKLSSVTAADTAVYYCARARGPWGFDPWGQGTLVTVSS

SEQ ID NO: 989 - protein, 107 aa, synthetic construct
  source 1..107: note = ADI-28153_vl
ELQMTQSPSSLSASVGDRVTITCRTSQSISSYLNWYQQKPGQPPKLLIYWASTRESGVPDRFSGSGSGTDFTLTISSLQPEDSATYYCQQSYDIPYTFGQGTKLEIK

SEQ ID NO: 990 - protein, 117 aa, synthetic construct; identical to SEQ ID NO: 978
  source 1..117: note = ADI-28226_vh

SEQ ID NO: 991 - protein, 107 aa, synthetic construct
  source 1..107: note = ADI-28226_vl
DIQMTQSPSTLSASVGDRVTITCRASQSISSWLAWYQQKPGKAPKLLIYKASSLESGVPSRFSGSGSGTEFTLTISSLQPDDFATYYCQQYGSFPITFGGGTKVEIK

SEQ ID NO: 992 - protein, 117 aa, synthetic construct; identical to SEQ ID NO: 978
  source 1..117: note = ADI-28154_vh

SEQ ID NO: 993 - protein, 107 aa, synthetic construct
  source 1..107: note = ADI-28154_vl
DIQMTQSPSTLSASVGDRVTITCRASQSISSWLAWYQQKPGKAPKLLIYKASSLESGVPSRFSGSGSGTDFTLTISSLQPDDFATYYCQQSKEVPWTFGQGTKVEIK

SEQ ID NO: 994 - protein, 117 aa, synthetic construct; identical to SEQ ID NO: 978
  source 1..117: note = ADI-29399_vh

SEQ ID NO: 995 - protein, 106 aa, synthetic construct
  source 1..106: note = ADI-29399_vl
DIQMTQSPSTLSASVGDRVTITCRASQSISSWLAWYQQKPGKAPKLLIYKASSLESGVPSRFSGSGSGTEFTLTISSLQPDDFATYYCQQYNSFPTFGGGTKVEIK

SEQ ID NO: 996 - protein, 117 aa, synthetic construct; identical to SEQ ID NO: 978
  source 1..117: note = ADI-29401_vh

SEQ ID NO: 997 - protein, 106 aa, synthetic construct
  source 1..106: note = ADI-29401_vl
DIQMTQSPSTLSASVGDRVTITCRASQSIGSWLAWYQQKPGKAPKLLIYKASSLESGVPSRFSGSGSGTEFTLTISSLQPDDFATYYCQQYDIYPTFGGGTKVEIK

SEQ ID NO: 998 - protein, 117 aa, synthetic construct; identical to SEQ ID NO: 978
  source 1..117: note = ADI-29403_vh

SEQ ID NO: 999 - protein, 106 aa, synthetic construct
  source 1..106: note = ADI-29403_vl
DIQMTQSPSTLSASVGDRVTITCRASQSISSWLAWYQQKPGKAPKLLIYKASSLESGVPSRFSGSGSGTEFTLTISSLQPDDFATYYCQQYDSYPTFGGGTKVEIK

SEQ ID NO: 1000 - protein, 117 aa, synthetic construct; identical to SEQ ID NO: 978
  source 1..117: note = ADI-29405_vh

SEQ ID NO: 1001 - protein, 106 aa, synthetic construct
  source 1..106: note = ADI-29405_vl
DIQMTQSPSTLSASVGDRVTITCRASQSISSWLAWYQQKPGKAPKLLIYKASSLESGVPSRFSGSGSGTEFTLTISSLQPDDFATYYCQQYGSFPTFGGGTKVEIK

SEQ ID NO: 1002 - protein, 117 aa, synthetic construct; identical to SEQ ID NO: 978
  source 1..117: note = ADI-29407_vh

SEQ ID NO: 1003 - protein, 106 aa, synthetic construct
  source 1..106: note = ADI-29407_vl
DIQMTQSPSTLSASVGDRVTITCRASQSISSWLAWYQQKPGKAPKLLIYKASSLESGVPSRFSGSGSGTEFTLTISSLQPDDFATYYCQQYQSFPTFGGGTKVEIK

SEQ ID NO: 1004 - protein, 117 aa, synthetic construct; identical to SEQ ID NO: 978
  source 1..117: note = ADI-29419_vh

SEQ ID NO: 1005 - protein, 106 aa, synthetic construct
  source 1..106: note = ADI-29419_vl
DIQMTQSPSTLSASVGDRVTITCRASQSISSWLAWYQQKPGKAPKLLIYKASSLESGVPSRFSGSGSGTEFTLTISSLQPDDFATYYCQQYSSFSTFGGGTKVEIK

SEQ ID NO: 1006 - protein, 117 aa, synthetic construct; identical to SEQ ID NO: 978
  source 1..117: note = ADI-29421_vh

SEQ ID NO: 1007 - protein, 106 aa, synthetic construct
  source 1..106: note = ADI-29421_vl
DIQMTQSPSTLSASVGDRVTITCRASQSISSWLAWYQQKPGKAPKLLIYKASSLESGVPSRFSGSGSGTEFTLTISSLQPDDFATYYCQQYESYSTFGGGTKVEIK

SEQ ID NO: 1008 - protein, 117 aa, synthetic construct; identical to SEQ ID NO: 978
  source 1..117: note = ADI-29424_vh

SEQ ID NO: 1009 - protein, 106 aa, synthetic construct
  source 1..106: note = ADI-29424_vl
DIQMTQSPSTLSASVGDRVTITCRASQSISSWLAWYQQKPGKAPKLLIYKASSLESGVPSRFSGSGSGTEFTLTISSLQPDDFATYYCQQYDSFITFGGGTKVEIK

SEQ ID NO: 1010 - protein, 117 aa, synthetic construct; identical to SEQ ID NO: 978
  source 1..117: note = ADI-29425_vh

SEQ ID NO: 1011 - protein, 106 aa, synthetic construct
  source 1..106: note = ADI-29425_vl
DIQMTQSPSTLSASVGDRVTITCRASQSISSWLAWYQQKPGKAPKLLIYKASSLESGVPSRFSGSGSGTEFTLTISSLQPDDFATYYCQQYQSYPTFGGGTKVEIK

SEQ ID NO: 1012 - protein, 117 aa, synthetic construct; identical to SEQ ID NO: 978
  source 1..117: note = ADI-29426_vh

SEQ ID NO: 1013 - protein, 106 aa, synthetic construct
  source 1..106: note = ADI-29426_vl
DIQMTQSPSTLSASVGDRVTITCRASQSIGSWLAWYQQKPGKAPKLLIYKASSLESGVPSRFSGSGSGTEFTLTISSLQPDDFATYYCQQYHSFPTFGGGTKVEIK

SEQ ID NO: 1014 - protein, 117 aa, synthetic construct; identical to SEQ ID NO: 978
  source 1..117: note = ADI-29429_vh

SEQ ID NO: 1015 - protein, 107 aa, synthetic construct
  source 1..107: note = ADI-29429_vl
DIQMTQSPSTLSASVGDRVTITCRASQSIGSWLAWYQQKPGKAPKLLIYKASSLESGVPSRFSGSGSGTEFTLTISSLQPDDFATYYCQQYELYSYTFGGGTKVEIK

SEQ ID NO: 1016 - protein, 117 aa, synthetic construct; identical to SEQ ID NO: 978
  source 1..117: note = ADI-29447_vh

SEQ ID NO: 1017 - protein, 106 aa, synthetic construct
  source 1..106: note = ADI-29447_vl
DIQMTQSPSTLSASVGDRVTITCRASQSISSWLAWYQQKPGKAPKLLIYKASSLESGVPSRFSGSGSGTEFTLTISSLQPDDFATYYCQQYDTFITFGGGTKVEIK

SEQ ID NO: 1018 - protein, 117 aa, synthetic construct; identical to SEQ ID NO: 978
  source 1..117: note = ADI-29404_vh

SEQ ID NO: 1019 - protein, 106 aa, synthetic construct
  source 1..106: note = ADI-29404_vl
DIQMTQSPSTLSASVGDRVTITCRASQSISSWLAWYQQKPGKAPKLLIYKASSLESGVPSRFSGSGSGTEFTLTISSLQPDDFATYYCEQYDSYPTFGGGTKVEIK

SEQ ID NO: 1020 - protein, 126 aa, synthetic construct
  source 1..126: note = ADI-28200_vh
QVQLVQSGAEVKKPGSSVKVSCKASGGTFSSYAISWVRQAPGQGLEWMGGIIPIFGTANYAQKFQGRVTITADESTSTAYMELSSLRSEDTAVYYCARRGRKASGSFYYYYGMDVWGQGTTVTVSS

SEQ ID NO: 1021 - protein, 113 aa, synthetic construct [sequence omitted]

SEQ ID NO: 1022 - protein, 93 aa, synthetic construct
  source 1..93: note = ET1F08_vh
MAQVQLVQSGGGLVQAGGSLRLSCAASMAWFRQAPGKEREFVALYYADSVKGRFTIARDNAKNTVDLQMNSLKPEDTAVYYCWGQGTQVTVSS

SEQ ID NO: 1023 - protein, 93 aa, synthetic construct
  source 1..93: note = ET2F09_vh
MAQVQLVQSGGGLVQPGGSLRLSCAASMSWVRQAPGKGLEWVSAYYAESMKGRFTTSRDNAKNTLYLQMNSLKPEDTALYYCWGQGTQVTVSS

SEQ ID NO: 1024 - protein, 121 aa, synthetic construct
  source 1..121: note = mAb E_vh
EVQLVESGGGLVKPGGSLRLSCAASGFTFSSYSMNWVRQAPGKGLEWVSSITSSSSYIYYADSVKGRFTISRDNAKNSLYLQMNSLRAEDTAVYYCARDRRYFDWFPLDYRGQGTLVTVSS

SEQ ID NO: 1025 - protein, 108 aa, synthetic construct
  source 1..108: note = mAb E_vl
DIQMTQSPSSLSASVGDRVTITCRASQGISSWLAWYQQKPEKAPKSLIYAASSLQSGVPSRFSGSGSGTDFTLTISSLQPEDFATYYCQQYNGYPYTFGQGTKLEIKR

SEQ ID NO: 1026 - protein, 115 aa, synthetic construct
  source 1..115: note = MS_vh
QVHLQESGPGLVKPSETLSLTCTVSDDSISSYYWSWIRQPPGKGLEWIGHISYSGSANYNPSLKSRVTISVDTSKNQFSLKLSSVTAADTAVYYCANWDDAFNIWGQGTMVTVSS

SEQ ID NO: 1027 - protein, 108 aa, synthetic construct
  source 1..108: note = MS_vl
EIVLTQSPGTLSLSPGERATLSCRASQSVSSSYLAWYQQKPGQAPRLLIYGASSRATGIPDRFSGSGSGTDFTLTISRLEPEDFAVYYCQQYGSSPWTFGQGTKVEIK

SEQ ID NO: 1028 - protein, 123 aa, synthetic construct
  source 1..123: note = 21F2_vh
EVQLVQSGAEVKEPGESLKISCKNSGYSFTNYWVGWVRQMPGKGLEWMGIIYPGDSDTRYSPSFQGQVTISADKSINTAYLQWSSLKASDTAMYYCGRLTMFRGIIIGYFDYWGQGTLVTVSS

SEQ ID NO: 1029 - protein, 107 aa, synthetic construct
  source 1..107: note = 21F2_vl
EIVLTQSPATLSLSPGERATLSCRASQSVSSYLAWYQQKPGQAPRLLIYDASNRATGIPARFSGSGSGTDFTLTISSLEPEDFAVYYCQQRSNWPWTFGQGTKVEIK

SEQ ID NO: 1030 - protein, 122 aa, synthetic construct
  source 1..122: note = 16F31_vh
EVQLVESGGGVVRPGGSLRLSCAASGFTFDDYGMTWVRQAPGKGLEWVSGINWNGGSTGYADSVKGRFTISRDNAKNSLYLQMNSLRAEDTALYYCARERELYYYYYGLDVWGQGTTVTVSS

SEQ ID NO: 1031 - protein, 109 aa, synthetic construct
  source 1..109: note = 16F31_vl
EIVLTQSPGTLSLSPGERATLSCRASQSVSSSYLAWYQQKPGQAPRLLIYGASSRATGIPDRFSGSGSGTDFTLTISRLEPEDFAVYYCQQYGSSPFTFGPGTKVDIKR

SEQ ID NO: 1032 - protein, 121 aa, synthetic construct
  source 1..121: note = KYK-2.0_vh
QVQLVESGGGLVKPGGSLRLSCAASGFTFSSYGMHWVRQAPGKGLEWVAFIRYDGSNKYYADSVKGRFTISRDNSKNTLYLQMNSLRAEDTAVYYCAKDRGLGDGTYFDYWGQGTTVTVSS

SEQ ID NO: 1033 - protein, 110 aa, synthetic construct
  source 1..110: note = KYK-2.0_vl
QSALTQPASVSGSPGQSITISCSGSSSNIGNNAVNWYQQLPGKAPKLLIYYDDLLPSGVSDRFSGSKSGTSAFLAISGLQSEDEADYYCAAWDDSLNGPVFGGGTKLTVL

SEQ ID NO: 1034 - protein, 118 aa, synthetic construct
  source 1..118: note = KYK-1.0_vh
EVQLVESGGGVVQPGGSLRLSCAASGFTFSSYGMHWVRQAPGKGLEWVAFIRYDGSNKYYADSVKGRFTISRDNSKNTKYLQMNSLRAEDTAVYYCAKDRFGYYLDYWGQGTLVTVSS

SEQ ID NO: 1035 - protein, 108 aa, synthetic construct
  source 1..108: note = KYK-1.0_vl
QPVLTQPSSVSVAPGETARIPCGGDDIETKSVHWYQQKPGQAPVLVIYDDDDRPSGIPERFFGSNSGNTATLSISRVEAGDEADYYCQVWDDNNDEWVFGGGTQLTVL

SEQ ID NO: 1036 - protein, 117 aa, synthetic construct
  source 1..117: note = 11B2D10_vh
QVQLQQSGPELVRPGASVKLSCKASGYTFTSYWMNWVQQRPEQGLEWIGRIDPYDSETHYNQKFKDKAILTVDKSASTAYMQLSSLTSEDSAVYYCAKMGDYSFDYWGQGTTVTVSS

SEQ ID NO: 1037 - protein, 107 aa, synthetic construct
  source 1..107: note = 11B2D10_vl
DIQLTQSPASLSASVGETVTITCRASGNIHNYLAWYQQKQGKSPQVLVYNAKTLADGVPSRFSGSGSGTQYSLKINSLQPEDFGSYYCQHFWSTTWTFGGGTKLEIK

SEQ ID NO: 1038 - protein, 120 aa, synthetic construct
  source 1..120: note = 6E5A7_vh
QVQLQQSGPGLVQPSQSLSITCTVSGFSLTIYGVHWVRQSPGKGLEWLGVIWSGGSTDYNAAFISRLSISKDNSKRQVFFKMSSLQANDTAIYYCSRKSHDGYYGVMDYWGQGTTVTVSS

SEQ ID NO: 1039 - protein, 107 aa, synthetic construct
  source 1..107: note = 6E5A7_vl
DIQLTQSPAILSVSPGERVSFSCRASQSIGTSIHWYQQRTNGSPRLLIKYASESISGIPSRFSGSGSGTDFTLSINGVESEDIADYYCQQSNTWPLTFGAGTKLEIK

SEQ ID NO: 1040 - protein, 119 aa, synthetic construct
  source 1..119: note = 6H7E7_vh
QVQLQESGPGLVAPSQSLSITCTVSGFSLTSYGVHWIRQPPGKGLEWLGVIWAGGSTNYNSALMSRLSISKDNSKSQVFLKMNSLQIDDTAMYYCARGGYEGAAWFGYWGQGTTVTVSS

SEQ ID NO: 1041 - protein, 106 aa, synthetic construct
  source 1..106: note = 6H7E7_vl
DIQLTQSPAILSASPGEKVTMTCRASSSVSYMHWYQQKPGSSPKPWIYATSNLASGVPARFSGSGSGTSYSLTISRVEAEDAATYYCQQWNSNPLTFGAGTKLEIK

SEQ ID NO: 1042 - protein, 119 aa, synthetic construct
  source 1..119: note = mAb A_H1_vh
QVQLVQSGAEVKKPGASVKVSCKVSGFSLTSYGVHWIRQAPGQGLEWMGVIWAGGSTNYNSKFQGRVTMTKDNSKSTVYMELSSLRSEDTAVYYCARGGYEGAAWFGYWGQGTLVTVSS

SEQ ID NO: 1043 - protein, 106 aa, synthetic construct
  source 1..106: note = mAb A_L1_vl
DIQLTQSPSSLSASVGDRVTITCRASSSVSYMHWYQQKPGKSPKPLIYATSNLASGVPARFSGSGSGTDYTLTISSLQPEDFATYYCQQWNSNPLTFGAGTKVEIK

SEQ ID NO: 1044 - protein, 119 aa, synthetic construct
  source 1..119: note = mAb A_H2_vh
QVQLQESGPGLVKPSETLSLTCTVSGFSLTSYGVHWIRQPPGKGLEWIGVIWAGGSTNYNPSLKSRVTISKDNSKSQVSLKLSSVTAADTAVYYCARGGYEGAAWFGYWGQGTLVTVSS

SEQ ID NO: 1045 - protein, 106 aa, synthetic construct
  source 1..106: note = mAb A_L2_vl
DIQLTQSPATLSLSPGERATLSCRASSSVSYMHWYQQKPGQSPRPLIYATSNLASGVPARFSGSGSGTDYTLTISSLEPEDFAVYYCQQWNSNPLTFGAGTKVEIK

SEQ ID NO: 1046 - protein, 117 aa, synthetic construct
  source 1..117: note = mAb B_H1_vh
QVQLVQSGAEVKKPGASVKVSCKASGYTFTSYWMNWVRQAPGQGLEWMGRIDPYDSETHYNQKFQGRVTMTVDKSTSTAYMELSSLRSEDTAVYYCAKMGDYSFDYWGQGTLVTVSS

SEQ ID NO: 1047 - protein, 117 aa, synthetic construct
  source 1..117: note = mAb B_H2_vh
EVQLVQSGAEVKKPGESLRISCKASGYTFTSYWMNWVRQMPGKGLEWMGRIDPYDSETHYNPSFQGHVTISVDKSISTAYLQWSSLKASDTAMYYCAKMGDYSFDYWGQGTLVTVSS

SEQ ID NO: 1048 - protein, 117 aa, synthetic construct
  source 1..117: note = mAb B_H3_vh
EVQLVESGGGLVQPGGSLRLSCAASGYTFTSYWMNWVRQAPGKGLVWVSRIDPYDSETHYNQKVKGRFTISVDKAKSTAYLQMNSLRAEDTAVYYCAKMGDYSFDYWGQGTLVTVSS

SEQ ID NO: 1049 - protein, 107 aa, synthetic construct
  source 1..107: note = mAb B_L1_vl
DIQLTQSPSSLSASVGDRVTITCRASGNIHNYLAWYQQKPGKSPKVLVYNAKTLADGVPSRFSGSGSGTDYTLTISSLQPEDFATYYCQHFWSTTWTFGGGTKVEIK

SEQ ID NO: 1050 - protein, 107 aa, synthetic construct
  source 1..107: note = mAb B_L1.1_vl
DIQLTQSPSSLSASVGDRVTITCRASGNIHNYLAWYQQKPGKSPKVLVYNAKTLADGVPSRFSGSGSGTDYTLTISSLQPEDFATYYCQHFWSTPWTFGGGTKVEIK

SEQ ID NO: 1051 - protein, 107 aa, synthetic construct
  source 1..107: note = mAb B_L2_vl
DIQLTQSPDSLAVSLGERATINCKASGNIHNYLAWYQQKPGQSPKVLVYNAKTLADGVPSRFSGSGSGTDYTLTISSLQAEDVAVYYCQHFWSTTWTFGGGTKVEIK

SEQ ID NO: 1052 - protein, 120 aa, synthetic construct
  source 1..120: note = mAb C_H1_vh
EVQLVESGGGLVQPGGSLRLSCAVSGFSLTIYGVHWVRQAPGKGLEWVSVIWSGGSTDYNAKVKGRFTISKDNSKRTVYLQMNSLRAEDTAVYYCSRKSHDGYYGVMDYWGQGTTVTVSS

SEQ ID NO: 1053 - protein, 120 aa, synthetic construct; identical to SEQ ID NO: 927
  source 1..120: note = mAb C_H2_vh

SEQ ID NO: 1054 - protein, 107 aa, synthetic construct; identical to SEQ ID NO: 931
  source 1..107: note = mAb C_L1_vl

SEQ ID NO: 1055 - protein, 107 aa, synthetic construct
  source 1..107: note = mAb C_L2_vl
DIQLTQSPSSLSASVGDRVTITCRASQSIGTSIHWYQQKPGKSPKLLIKYASESISGIPSRFSGSGSGTDFTLTISSLQPEDFATYYCQQSNTWPLTFGAGTKVEIK

SEQ ID NO: 1056 - protein, 125 aa, synthetic construct
  source 1..125: note = ADI-27727_vh
QVQLVQSGAEVKKPGSSVKVSCKASGGTFSSYAISWVRQAPGQGLEWMGGIIPIFGTANYAQKFQGRVTITADESTSTAYMELSSLRSEDTAVYYCARGDSSIRHAYYYYGMDVWGQGTTVTVSS

SEQ ID NO: 1057 - protein, 113 aa, synthetic construct
  source 1..113: note = ADI-27727_vl
DIVMTQSPDSLAVSLGERATINCKSSQSVLYSSNNKNYLAWYQQKPGQPPKLLIYWASTRESGVPDRFSGSGSGTDFTLTISSLQAEDVAVYYCQQYYSTPITFGGGTKVEIK

SEQ ID NO: 1058 - protein, 122 aa, synthetic construct
  source 1..122: note = ADI-27749_vh
EVQLVESGGGLVKPGGSLRLSCAASGFTFSSYSMNWVRQAPGKGLEWVSSISSSSSYIYYADSVKGRFTISRDNAKNSLYLQMNSLRAEDTAVYYCARGAPMGAAAGWFDPWGQGTLVTVSS

SEQ ID NO: 1059 - protein, 107 aa, synthetic construct
  source 1..107: note = ADI-27749_vl
DIQMTQSPSSVSASVGDRVTITCRASQGISSWLAWYQQKPGKAPKLLIYAASSLQSGVPSRFSGSGSGTDFTLTISSLQPEDFATYYCQQGVSFPRTFGGGTKVEIK

SEQ ID NO: 1060 - protein, 121 aa, synthetic construct
  source 1..121: note = ADI-27744_vh
EVQLLESGGGLVQPGGSLRLSCAASGFTFSSYAMSWVRQAPGKGLEWVSAISGSGGSTYYADSVKGRFTISRDNSKNTLYLQMNSLRAEDTAVYYCAKDGGYYDSGAGDYWGQGTLVTVSS

SEQ ID NO: 1061 - protein, 107 aa, synthetic construct
  source 1..107: note = ADI-27744_vl
DIQMTQSPSSVSASVGDRVTITCRASQGIDSWLAWYQQKPGKAPKLLIYAASSLQSGVPSRFSGSGSGTDFTLTISSLQPEDFATYYCQQGVSYPRTFGGGTKVEIK

SEQ ID NO: 1062 - protein, 121 aa, synthetic construct
  source 1..121: note = ADI-29443_vh
QLQLQESGPGLVKPSETLSLTCTVSGGSISSSSYYWGWIRQPPGKGLEWIGSIYYSGSTYYNPSLKSRVTISVDTSKNQFSLKLSSVTAADTAVYYCARGSDRFHPYFDYWGQGTLVTVSS

SEQ ID NO: 1063 - protein, 107 aa, synthetic construct
  source 1..107: note = ADI-29443_vl
EIVLTQSPATLSLSPGERATLSCRASQSVSRYLAWYQQKPGQAPRLLIYDASNRATGIPARFSGSGSGTDFTLTISSLEPEDFAVYYCQQFDTWPPTFGGGTKVEIK

SEQ ID NO: 1064 - protein, 125 aa, synthetic construct
  source 1..125: note = ADI-29378_vh
QVQLVQSGAEVKKPGASVKVSCKASGYTFTSYYMHWVRQAPGQGLEWMGIINPSGGSTSYAQKFQGRVTMTRDTSTSTVYMELSSLRSEDTAVYYCAREGAGFAYGMDYYYMDVWGKGTTVTVSS

SEQ ID NO: 1065 - protein, 107 aa, synthetic construct
  source 1..107: note = ADI-29378_vl
EIVLTQSPATLSLSPGERATLSCRASQSVSSYLAWYQQKPGQAPRLLIYDASNRATGIPARFSGSGSGTDFTLTISSLEPEDFAVYYCQQSDNWPFTFGGGTKVEIK

SEQ ID NO: 1066 - protein, 126 aa, synthetic construct
  source 1..126: note = ADI-29379_vh
QVQLVQSGAEVKKPGASVKVSCKASGYTFTSYYMHWVRQAPGQGLEWMGIINPSGGSTSYAQKFQGRVTMTRDTSTSTVYMELSSLRSEDTAVYYCARGAPNYGDTTHDYYYMDVWGKGTTVTVSS

SEQ ID NO: 1067 - protein, 107 aa, synthetic construct
  source 1..107: note = ADI-29379_vl
EIVMTQSPATLSVSPGERATLSCRASQSVSSNLAWYQQKPGQAPRLLIYGASTRATGIPARFSGSGSGTEFTLTISSLQSEDFAVYYCQQYDDWPFTFGGGTKVEIK

SEQ ID NO: 1068 - protein, 124 aa, synthetic construct
  source 1..124: note = ADI-29463_vh
QVQLVQSGAEVKKPGASVKVSCKASGYTFTGYYMHWVRQAPGQGLEWMGWINPNSGGTNYAQKFQGRVTMTRDTSISTAYMELSRLRSDDTAVYYCARDTGEYYDTDDHGMDVWGQGTTVTVSS

SEQ ID NO: 1069 - protein, 107 aa, synthetic construct
  source 1..107: note = ADI-29463_vl
EIVLTQSPGTLSLSPGERATLSCRASQSVSSNLAWYQQKPGQAPRLLIYGASTRATGIPARFSGSGSGTEFTLTISSLQSEDFAVYYCQQDDYWPPTFGGGTKVEIK

SEQ ID NO: 1070 - protein, 121 aa, synthetic construct
  source 1..121: note = 1D7B4[NKG2D]_H1.1_vh
EVQLLESGGGLVQPGGSLRLSCAASGFTFSSIAMSWVRQAPGKGLEWVSSISASGGSTYYADSVKGRFTISRDNSKNTLYLQMNSLRAEDTAVYYCAKGIFSIYFFYFDYWGQGTLVTVSS

SEQ ID NO: 1071 - protein, 5 aa, synthetic construct
  source 1..5: note = 1D7B4[NKG2D]_H1.1_vhCDR1
SIAMS

SEQ ID NO: 1072 - protein, 17 aa, synthetic construct
  source 1..17: note = 1D7B4[NKG2D]_H1.1_vhCDR2
SISASGGSTYYADSVKG

SEQ ID NO: 1073 - protein, 12 aa, synthetic construct
  source 1..12: note = 1D7B4[NKG2D]_H1.1_vhCDR3
GIFSIYFFYFDY

SEQ ID NO: 1074 - protein, 121 aa, synthetic construct
  source 1..121: note = 1D7B4[NKG2D]_H1.2_vh
EVQLLESGGGLVQPGGSLRLSCAASGFTFSSAAMSWVRQAPGKGLEWVSSISASGGSTYYADSVKGRFTISRDNSKNTLYLQMNSLRAEDTAVYYCAKGIFSIYFFYFDYWGQGTLVTVSS

SEQ ID NO: 1075 - protein, 5 aa, synthetic construct
  source 1..5: note = 1D7B4[NKG2D]_H1.2_vhCDR1
SAAMS

SEQ ID NO: 1076 - protein, 17 aa, synthetic construct
  source 1..17: note = 1D7B4[NKG2D]_H1.2_vhCDR2
SISASGGSTYYADSVKG

SEQ ID NO: 1077 - protein, 12 aa, synthetic construct
  source 1..12: note = 1D7B4[NKG2D]_H1.2_vhCDR3
GIFSIYFFYFDY

SEQ ID NO: 1078 - protein, 121 aa, synthetic construct
  source 1..121: note = 1D7B4[NKG2D]_H1.3_vh
EVQLLESGGGLVQPGGSLRLSCAASGFTFSSSAMSWVRQAPGKGLEWVSSISASGGSTYYADSVKGRFTISRDNSKNTLYLQMNSLRAEDTAVYYCAKGIFSIYFFYFDYWGQGTLVTVSS

SEQ ID NO: 1079 - protein, 5 aa, synthetic construct
  source 1..5: note = 1D7B4[NKG2D]_H1.3_vhCDR1
SSAMS

SEQ ID NO: 1080 - protein, 17 aa, synthetic construct
  source 1..17: note = 1D7B4[NKG2D]_H1.3_vhCDR2
SISASGGSTYYADSVKG

SEQ ID NO: 1081 - protein, 12 aa, synthetic construct
  source 1..12: note = 1D7B4[NKG2D]_H1.3_vhCDR3
GIFSIYFFYFDY

SEQ ID NO: 1082 - protein, 121 aa, synthetic construct
  source 1..121: note = 1D7B4[NKG2D]_H1.4_vh
EVQLLESGGGLVQPGGSLRLSCAASGFTFSSEAMSWVRQAPGKGLEWVSSISASGGSTYYADSVKGRFTISRDNSKNTLYLQMNSLRAEDTAVYYCAKGIFSIYFFYFDYWGQGTLVTVSS

SEQ ID NO: 1083 - protein, 5 aa, synthetic construct
  source 1..5: note = 1D7B4[NKG2D]_H1.4_vhCDR1
SEAMS

SEQ ID NO: 1084 - protein, 17 aa, synthetic construct
  source 1..17: note = 1D7B4[NKG2D]_H1.4_vhCDR2
SISASGGSTYYADSVKG

SEQ ID NO: 1085 - protein, 12 aa, synthetic construct
  source 1..12: note = 1D7B4[NKG2D]_H1.4_vhCDR3
GIFSIYFFYFDY

SEQ ID NO: 1086 - protein, 121 aa, synthetic construct
  source 1..121: note = 1D7B4[NKG2D]_H1.5_vh
EVQLLESGGGLVQPGGSLRLSCAASGFTFSSHAMSWVRQAPGKGLEWVSSISASGGSTYYADSVKGRFTISRDNSKNTLYLQMNSLRAEDTAVYYCAKGIFSIYFFYFDYWGQGTLVTVSS

SEQ ID NO: 1087 - protein, 5 aa, synthetic construct
  source 1..5: note = 1D7B4[NKG2D]_H1.5_vhCDR1
SHAMS

SEQ ID NO: 1088 - protein, 17 aa, synthetic construct
  source 1..17: note = 1D7B4[NKG2D]_H1.5_vhCDR2
SISASGGSTYYADSVKG

SEQ ID NO: 1089 - protein, 12 aa, synthetic construct
  source 1..12: note = 1D7B4[NKG2D]_H1.5_vhCDR3
GIFSIYFFYFDY

SEQ ID NO: 1090 - protein, 121 aa, synthetic construct
  source 1..121: note = 1D7B4[NKG2D]_H1.6_vh
EVQLLESGGGLVQPGGSLRLSCAASGFTFSSQAMSWVRQAPGKGLEWVSSISASGGSTYYADSVKGRFTISRDNSKNTLYLQMNSLRAEDTAVYYCAKGIFSIYFFYFDYWGQGTLVTVSS

SEQ ID NO: 1091 - protein, 5 aa, synthetic construct
  source 1..5: note = 1D7B4[NKG2D]_H1.6_vhCDR1
SQAMS

SEQ ID NO: 1092 - protein, 17 aa, synthetic construct
  source 1..17: note = 1D7B4[NKG2D]_H1.6_vhCDR2
SISASGGSTYYADSVKG

SEQ ID NO: 1093 - protein, 12 aa, synthetic construct
  source 1..12: note = 1D7B4[NKG2D]_H1.6_vhCDR3
GIFSIYFFYFDY

SEQ ID NO: 1094 - protein, 121 aa, synthetic construct
  source 1..121: note = 1D7B4[NKG2D]_H1.7_vh
EVQLLESGGGLVQPGGSLRLSCAASGFTFSSYFMSWVRQAPGKGLEWVSSISASGGSTYYADSVKGRFTISRDNSKNTLYLQMNSLRAEDTAVYYCAKGIFSIYFFYFDYWGQGTLVTVSS

SEQ ID NO: 1095 - protein, 5 aa, synthetic construct
  source 1..5: note = 1D7B4[NKG2D]_H1.7_vhCDR1
SYFMS

SEQ ID NO: 1096 - protein, 17 aa, synthetic construct
  source 1..17: note = 1D7B4[NKG2D]_H1.7_vhCDR2
SISASGGSTYYADSVKG

SEQ ID NO: 1097 - protein, 12 aa, synthetic construct
  source 1..12: note = 1D7B4[NKG2D]_H1.7_vhCDR3
GIFSIYFFYFDY

SEQ ID NO: 1098 - protein, 121 aa, synthetic construct
  source 1..121: note = 1D7B4[NKG2D]_H1.8_vh
EVQLLESGGGLVQPGGSLRLSCAASGFTFSSYHMSWVRQAPGKGLEWVSSISASGGSTYYADSVKGRFTISRDNSKNTLYLQMNSLRAEDTAVYYCAKGIFSIYFFYFDYWGQGTLVTVSS

SEQ ID NO: 1099 - protein, 5 aa, synthetic construct
  source 1..5: note = 1D7B4[NKG2D]_H1.8_vhCDR1
SYHMS

SEQ ID NO: 1100 - protein, 17 aa, synthetic construct
  source 1..17: note = 1D7B4[NKG2D]_H1.8_vhCDR2
SISASGGSTYYADSVKG

SEQ ID NO: 1101 - protein, 12 aa, synthetic construct
  source 1..12: note = 1D7B4[NKG2D]_H1.8_vhCDR3
GIFSIYFFYFDY

SEQ ID NO: 1102 - protein, 121 aa, synthetic construct
  source 1..121: note = 1D7B4[NKG2D]_H1.9_vh
EVQLLESGGGLVQPGGSLRLSCAASGFTFSSYAMSWVRQAPGKGLEWVSSISASGGSTYYADSVKGRFTISRDNSKNTLYLQMNSLRAEDTAVYYCAKGWFSIYFFYFDYWGQGTLVTVSS

SEQ ID NO: 1103 - protein, 5 aa, synthetic construct
  source 1..5: note = 1D7B4[NKG2D]_H1.9_vhCDR1
SYAMS

SEQ ID NO: 1104 - protein, 17 aa, synthetic construct
  source 1..17: note = 1D7B4[NKG2D]_H1.9_vhCDR2
SISASGGSTYYADSVKG

SEQ ID NO: 1105 - protein, 12 aa, synthetic construct
  source 1..12: note = 1D7B4[NKG2D]_H1.9_vhCDR3
GWFSIYFFYFDY

SEQ ID NO: 1106 - protein, 121 aa, synthetic construct
  source 1..121: note = 1D7B4[NKG2D]_H1.10_vh
EVQLLESGGGLVQPGGSLRLSCAASGFTFSSYAMSWVRQAPGKGLEWVSSISASGGSTYYADSVKGRFTISRDNSKNTLYLQMNSLRAEDTAVYYCAKGEFSIYFFYFDYWGQGTLVTVSS

SEQ ID NO: 1107 - protein, 5 aa, synthetic construct
  source 1..5: note = 1D7B4[NKG2D]_H1.10_vhCDR1
SYAMS

SEQ ID NO: 1108 - protein, 17 aa, synthetic construct
  source 1..17: note = 1D7B4[NKG2D]_H1.10_vhCDR2
SISASGGSTYYADSVKG

SEQ ID NO: 1109 - protein, 12 aa, synthetic construct
  source 1..12: note = 1D7B4[NKG2D]_H1.10_vhCDR3
GEFSIYFFYFDY

SEQ ID NO: 1110 - protein, 121 aa, synthetic construct
  source 1..121: note = 1D7B4[NKG2D]_H1.11_vh
EVQLLESGGGLVQPGGSLRLSCAASGFTFSSYAMSWVRQAPGKGLEWVSSISASGGSTYYADSVKGRFTISRDNSKNTLYLQMNSLRAEDTAVYYCAKGKFSIYFFYFDYWGQGTLVTVSS

SEQ ID NO: 1111 - protein, 5 aa, synthetic construct
  source 1..5: note = 1D7B4[NKG2D]_H1.11_vhCDR1
SYAMS

SEQ ID NO: 1112 - protein, 17 aa, synthetic construct
  source 1..17: note = 1D7B4[NKG2D]_H1.11_vhCDR2
SISASGGSTYYADSVKG

SEQ ID NO: 1113 - protein, 12 aa, synthetic construct
  source 1..12: note = 1D7B4[NKG2D]_H1.11_vhCDR3
GKFSIYFFYFDY

SEQ ID NO: 1114 - protein, 121 aa, synthetic construct
  source 1..121: note = 1D7B4[NKG2D]_H1.12_vh
EVQLLESGGGLVQPGGSLRLSCAASGFTFSSYAMSWVRQAPGKGLEWVSSISASGGSTYYADSVKGRFTISRDNSKNTLYLQMNSLRAEDTAVYYCAKGAFSIYFFYFDYWGQGTLVTVSS

SEQ ID NO: 1115 - protein, 5 aa, synthetic construct
  source 1..5: note = 1D7B4[NKG2D]_H1.12_vhCDR1
SYAMS

SEQ ID NO: 1116 - protein, 17 aa, synthetic construct
  source 1..17: note = 1D7B4[NKG2D]_H1.12_vhCDR2
SISASGGSTYYADSVKG

SEQ ID NO: 1117 - protein, 12 aa, synthetic construct
  source 1..12: note = 1D7B4[NKG2D]_H1.12_vhCDR3
GAFSIYFFYFDY

SEQ ID NO: 1118 - protein, 120 aa, synthetic construct
  source 1..120: note = 1D7B4[NKG2D]_H1.13_vh
EVQLLESGGGLVQPGGSLRLSCAASGFTFSSYAMSWVRQAPGKGLEWVSSISASGGSTYYADSVKGRFTISRDNSKNTLYLQMNSLRAEDTAVYYCAKGHFSIYFFYFDYWGQGTLVTVS

SEQ ID NO: 1119 - protein, 5 aa, synthetic construct
  source 1..5: note = 1D7B4[NKG2D]_H1.13_vhCDR1
SYAMS

SEQ ID NO: 1120 - protein, 17 aa, synthetic construct
  source 1..17: note = 1D7B4[NKG2D]_H1.13_vhCDR2
SISASGGSTYYADSVKG

SEQ ID NO: 1121 - protein, 12 aa, synthetic construct
  source 1..12: note = 1D7B4[NKG2D]_H1.13_vhCDR3
GHFSIYFFYFDY

SEQ ID NO: 1122 - protein, 121 aa, synthetic construct
  source 1..121: note = 1D7B4[NKG2D]_H1.14_vh
EVQLLESGGGLVQPGGSLRLSCAASGFTFSSYAMSWVRQAPGKGLEWVSSISASGGSTYYADSVKGRFTISRDNSKNTLYLQMNSLRAEDTAVYYCAKGIESIYFFYFDYWGQGTLVTVSS

SEQ ID NO: 1123 - protein, 5 aa, synthetic construct
  source 1..5: note = 1D7B4[NKG2D]_H1.14_vhCDR1
SYAMS

SEQ ID NO: 1124 - protein, 17 aa, synthetic construct
  source 1..17: note = 1D7B4[NKG2D]_H1.14_vhCDR2
SISASGGSTYYADSVKG

SEQ ID NO: 1125 - protein, 12 aa, synthetic construct
  source 1..12: note = 1D7B4[NKG2D]_H1.14_vhCDR3
GIESIYFFYFDY

SEQ ID NO: 1126 - protein, 121 aa, synthetic construct
  source 1..121: note = 1D7B4[NKG2D]_H1.15_vh
EVQLLESGGGLVQPGGSLRLSCAASGFTFSSYAMSWVRQAPGKGLEWVSSISASGGSTYYADSVKGRFTISRDNSKNTLYLQMNSLRAEDTAVYYCAKGIASIYFFYFDYWGQGTLVTVSS

SEQ ID NO: 1127 - protein, 5 aa, synthetic construct
  source 1..5: note = 1D7B4[NKG2D]_H1.15_vhCDR1
SYAMS

SEQ ID NO: 1128 - protein, 17 aa, synthetic construct
  source 1..17: note = 1D7B4[NKG2D]_H1.15_vhCDR2
SISASGGSTYYADSVKG

SEQ ID NO: 1129 - protein, 12 aa, synthetic construct
  source 1..12: note = 1D7B4[NKG2D]_H1.15_vhCDR3
GIASIYFFYFDY

SEQ ID NO: 1130 - protein, 121 aa, synthetic construct
  source 1..121: note = 1D7B4[NKG2D]_H1.16_vh
EVQLLESGGGLVQPGGSLRLSCAASGFTFSSYAMSWVRQAPGKGLEWVSSISASGGSTYYADSVKGRFTISRDNSKNTLYLQMNSLRAEDTAVYYCAKGIWSIYFFYFDYWGQGTLVTVSS

SEQ ID NO: 1131 - protein, 5 aa, synthetic construct
  source 1..5: note = 1D7B4[NKG2D]_H1.16_vhCDR1
SYAMS

SEQ ID NO: 1132 - protein, 17 aa, synthetic construct
  source 1..17: note = 1D7B4[NKG2D]_H1.16_vhCDR2
SISASGGSTYYADSVKG

SEQ ID NO: 1133 - protein, 12 aa, synthetic construct
  source 1..12: note = 1D7B4[NKG2D]_H1.16_vhCDR3
GIWSIYFFYFDY

SEQ ID NO: 1134 - protein, 121 aa, synthetic construct
  source 1..121: note = 1D7B4[NKG2D]_H1.17_vh
EVQLLESGGGLVQPGGSLRLSCAASGFTFSSYAMSWVRQAPGKGLEWVSSISASGGSTYYADSVKGRFTISRDNSKNTLYLQMNSLRAEDTAVYYCAKGIQSIYFFYFDYWGQGTLVTVSS

SEQ ID NO: 1135 - protein, 5 aa, synthetic construct
  source 1..5: note = 1D7B4[NKG2D]_H1.17_vhCDR1
SYAMS

SEQ ID NO: 1136 - protein, 17 aa, synthetic construct
  source 1..17: note = 1D7B4[NKG2D]_H1.17_vhCDR2
SISASGGSTYYADSVKG

SEQ ID NO: 1137 - protein, 12 aa, synthetic construct
  source 1..12: note = 1D7B4[NKG2D]_H1.17_vhCDR3
GIQSIYFFYFDY

SEQ ID NO: 1138 - protein, 121 aa, synthetic construct
  source 1..121: note = 1D7B4[NKG2D]_H1.18_vh
EVQLLESGGGLVQPGGSLRLSCAASGFTFSSYAMSWVRQAPGKGLEWVSSISASGGSTYYADSVKGRFTISRDNSKNTLYLQMNSLRAEDTAVYYCAKGISSIYFFYFDYWGQGTLVTVSS

SEQ ID NO: 1139 - protein, 5 aa, synthetic construct
  source 1..5: note = 1D7B4[NKG2D]_H1.18_vhCDR1
SYAMS

SEQ ID NO: 1140 - protein, 17 aa, synthetic construct
  source 1..17: note = 1D7B4[NKG2D]_H1.18_vhCDR2
SISASGGSTYYADSVKG

SEQ ID NO: 1141 - protein, 12 aa, synthetic construct
  source 1..12: note = 1D7B4[NKG2D]_H1.18_vhCDR3
GISSIYFFYFDY

SEQ ID NO: 1142 - protein, 121 aa, synthetic construct
  source 1..121: note = 1D7B4[NKG2D]_H1.19_vh
EVQLLESGGGLVQPGGSLRLSCAASGFTFSSYAMSWVRQAPGKGLEWVSSISASGGSTYYADSVKGRFTISRDNSKNTLYLQMNSLRAEDTAVYYCAKGIHSIYFFYFDYWGQGTLVTVSS

SEQ ID NO: 1143 - protein, 5 aa, synthetic construct
  source 1..5: note = 1D7B4[NKG2D]_H1.19_vhCDR1
SYAMS

SEQ ID NO: 1144 - protein, 17 aa, synthetic construct
  source 1..17: note = 1D7B4[NKG2D]_H1.19_vhCDR2
SISASGGSTYYADSVKG

SEQ ID NO: 1145 - protein, 12 aa, synthetic construct
  source 1..12: note = 1D7B4[NKG2D]_H1.19_vhCDR3
GIHSIYFFYFDY

SEQ ID NO: 1146 - protein, 121 aa, synthetic construct
  source 1..121: note = 1D7B4[NKG2D]_H1.20_vh
EVQLLESGGGLVQPGGSLRLSCAASGFTFSSYAMSWVRQAPGKGLEWVSSISASGGSTYYADSVKGRFTISRDNSKNTLYLQMNSLRAEDTAVYYCAKGIISIYFFYFDYWGQGTLVTVSS

SEQ ID NO: 1147 - protein, 5 aa, synthetic construct
  source 1..5: note = 1D7B4[NKG2D]_H1.20_vhCDR1
SYAMS

SEQ ID NO: 1148 - protein, 17 aa, synthetic construct
  source 1..17: note = 1D7B4[NKG2D]_H1.20_vhCDR2
SISASGGSTYYADSVKG

SEQ ID NO: 1149 - protein, 12 aa, synthetic construct
  source 1..12: note = 1D7B4[NKG2D]_H1.20_vhCDR3
GIISIYFFYFDY

SEQ ID NO: 1150 - protein, 121 aa, synthetic construct
  source 1..121: note = 1D7B4[NKG2D]_H1.21_vh
EVQLLESGGGLVQPGGSLRLSCAASGFTFSSYAMSWVRQAPGKGLEWVSSISASGGSTYYADSVKGRFTISRDNSKNTLYLQMNSLRAEDTAVYYCAKGIFYIYFFYFDYWGQGTLVTVSS

SEQ ID NO: 1151 - protein, 5 aa, synthetic construct
  source 1..5: note = 1D7B4[NKG2D]_H1.21_vhCDR1
SYAMS

SEQ ID NO: 1152 - protein, 17 aa, synthetic construct
  source 1..17: note = 1D7B4[NKG2D]_H1.21_vhCDR2
SISASGGSTYYADSVKG

SEQ ID NO: 1153 - protein, 12 aa, synthetic construct
  source 1..12: note = 1D7B4[NKG2D]_H1.21_vhCDR3
GIFYIYFFYFDY

SEQ ID NO: 1154 - protein, 121 aa, synthetic construct
  source 1..121: note = 1D7B4[NKG2D]_H1.22_vh
EVQLLESGGGLVQPGGSLRLSCAASGFTFSSYAMSWVRQAPGKGLEWVSSISASGGSTYYADSVKGRFTISRDNSKNTLYLQMNSLRAEDTAVYYCAKGIFEIYFFYFDYWGQGTLVTVSS

SEQ ID NO: 1155 - protein, 5 aa, synthetic construct
  source 1..5: note = 1D7B4[NKG2D]_H1.22_vhCDR1
SYAMS

SEQ ID NO: 1156 - protein, 17 aa, synthetic construct
  source 1..17: note = 1D7B4[NKG2D]_H1.22_vhCDR2
SISASGGSTYYADSVKG

SEQ ID NO: 1157 - protein, 12 aa, synthetic construct
  source 1..12: note = 1D7B4[NKG2D]_H1.22_vhCDR3
GIFEIYFFYFDY

SEQ ID NO: 1158 - protein, 121 aa, synthetic construct
  source 1..121: note = 1D7B4[NKG2D]_H1.23_vh
EVQLLESGGGLVQPGGSLRLSCAASGFTFSSYAMSWVRQAPGKGLEWVSSISASGGSTYYADSVKGRFTISRDNSKNTLYLQMNSLRAEDTAVYYCAKGIFAIYFFYFDYWGQGTLVTVSS

SEQ ID NO: 1159 - protein, 5 aa, synthetic construct
  source 1..5: note = 1D7B4[NKG2D]_H1.23_vhCDR1
SYAMS

SEQ ID NO: 1160 - protein, 17 aa, synthetic construct
  source 1..17: note = 1D7B4[NKG2D]_H1.23_vhCDR2
SISASGGSTYYADSVKG

SEQ ID NO: 1161 - protein, 12 aa, synthetic construct
  source 1..12: note = 1D7B4[NKG2D]_H1.23_vhCDR3
GIFAIYFFYFDY

SEQ ID NO: 1162 - protein, 121 aa, synthetic construct
  source 1..121: note = 1D7B4[NKG2D]_H1.24_vh
EVQLLESGGGLVQPGGSLRLSCAASGFTFSSYAMSWVRQAPGKGLEWVSSISASGGSTYYADSVKGRFTISRDNSKNTLYLQMNSLRAEDTAVYYCAKGIFSWYFFYFDYWGQGTLVTVSS

SEQ ID NO: 1163 - protein, 5 aa, synthetic construct
  source 1..5: note = 1D7B4[NKG2D]_H1.24_vhCDR1
SYAMS

SEQ ID NO: 1164 - protein, 17 aa, synthetic construct
  source 1..17: note = 1D7B4[NKG2D]_H1.24_vhCDR2
SISASGGSTYYADSVKG

SEQ ID NO: 1165 - protein, 12 aa, synthetic construct
  source 1..12: note = 1D7B4[NKG2D]_H1.24_vhCDR3
GIFSWYFFYFDY

SEQ ID NO: 1166 - protein, 121 aa, synthetic construct
  source 1..121: note = 1D7B4[NKG2D]_H1.25_vh
EVQLLESGGGLVQPGGSLRLSCAASGFTFSSYAMSWVRQAPGKGLEWVSSISASGGSTYYADSVKGRFTISRDNSKNTLYLQMNSLRAEDTAVYYCAKGIFSAYFFYFDYWGQGTLVTVSS

SEQ ID NO: 1167 - protein, 5 aa, synthetic construct
  source 1..5: note = 1D7B4[NKG2D]_H1.25_vhCDR1
SYAMS

SEQ ID NO: 1168 - protein, 17 aa, synthetic construct
  source 1..17: note = 1D7B4[NKG2D]_H1.25_vhCDR2
SISASGGSTYYADSVKG

SEQ ID NO: 1169 - protein, 12 aa, synthetic construct
  source 1..12: note = 1D7B4[NKG2D]_H1.25_vhCDR3
GIFSAYFFYFDY

SEQ ID NO: 1170 - protein, 121 aa, synthetic construct
  source 1..121: note = 1D7B4[NKG2D]_H1.26_vh
EVQLLESGGGLVQPGGSLRLSCAASGFTFSSYAMSWVRQAPGKGLEWVSSISASGGSTYYADSVKGRFTISRDNSKNTLYLQMNSLRAEDTAVYYCAKGIFSQYFFYFDYWGQGTLVTVSS

SEQ ID NO: 1171 - protein, 5 aa, synthetic construct
  source 1..5: note = 1D7B4[NKG2D]_H1.26_vhCDR1
SYAMS

SEQ ID NO: 1172 - protein, 17 aa, synthetic construct
  source 1..17: note = 1D7B4[NKG2D]_H1.26_vhCDR2
SISASGGSTYYADSVKG

SEQ ID NO: 1173 - protein, 12 aa, synthetic construct
  source 1..12: note = 1D7B4[NKG2D]_H1.26_vhCDR3
GIFSQYFFYFDY

SEQ ID NO: 1174 - protein, 121 aa, synthetic construct
  source 1..121: note = 1D7B4[NKG2D]_H1.27_vh
EVQLLESGGGLVQPGGSLRLSCAASGFTFSSYAMSWVRQAPGKGLEWVSSISASGGSTYYADSVKGRFTISRDNSKNTLYLQMNSLRAEDTAVYYCAKGIFSEYFFYFDYWGQGTLVTVSS

SEQ ID NO: 1175 - protein, 5 aa, synthetic construct
  source 1..5: note = 1D7B4[NKG2D]_H1.27_vhCDR1
SYAMS

SEQ ID NO: 1176 - protein, 17 aa, synthetic construct
  source 1..17: note = 1D7B4[NKG2D]_H1.27_vhCDR2
SISASGGSTYYADSVKG

SEQ ID NO: 1177 - protein, 12 aa, synthetic construct
  source 1..12: note = 1D7B4[NKG2D]_H1.27_vhCDR3
GIFSEYFFYFDY

SEQ ID NO: 1178 - protein, 121 aa, synthetic construct
  source 1..121: note = 1D7B4[NKG2D]_H1.28_vh
EVQLLESGGGLVQPGGSLRLSCAASGFTFSSYAMSWVRQAPGKGLEWVSSISASGGSTYYADSVKGRFTISRDNSKNTLYLQMNSLRAEDTAVYYCAKGIFSHYFFYFDYWGQGTLVTVSS

SEQ ID NO: 1179 - protein, 5 aa, synthetic construct
  source 1..5: note = 1D7B4[NKG2D]_H1.28_vhCDR1
SYAMS

SEQ ID NO: 1180 - protein, 17 aa, synthetic construct
  source 1..17: note = 1D7B4[NKG2D]_H1.28_vhCDR2
SISASGGSTYYADSVKG

SEQ ID NO: 1181 - protein, 12 aa, synthetic construct
  source 1..12: note = 1D7B4[NKG2D]_H1.28_vhCDR3
GIFSHYFFYFDY

SEQ ID NO: 1182 - protein, 121 aa, synthetic construct
  source 1..121: note = 1D7B4[NKG2D]_H1.29_vh
EVQLLESGGGLVQPGGSLRLSCAASGFTFSSYAMSWVRQAPGKGLEWVSSISASGGSTYYADSVKGRFTISRDNSKNTLYLQMNSLRAEDTAVYYCAKGIFSSYFFYFDYWGQGTLVTVSS

SEQ ID NO: 1183 - protein, 5 aa, synthetic construct
  source 1..5: note = 1D7B4[NKG2D]_H1.29_vhCDR1
SYAMS

SEQ ID NO: 1184 - protein, 17 aa, synthetic construct
  source 1..17: note = 1D7B4[NKG2D]_H1.29_vhCDR2
SISASGGSTYYADSVKG

SEQ ID NO: 1185 - protein, 12 aa, synthetic construct
  source 1..12: note = 1D7B4[NKG2D]_H1.29_vhCDR3
GIFSSYFFYFDY

SEQ ID NO: 1186 - protein, 121 aa, synthetic construct
  source 1..121: note = 1D7B4[NKG2D]_H1.30_vh
EVQLLESGGGLVQPGGSLRLSCAASGFTFSSYAMSWVRQAPGKGLEWVSSISASGGSTYYADSVKGRFTISRDNSKNTLYLQMNSLRAEDTAVYYCAKGIFSIHFFYFDYWGQGTLVTVSS

SEQ ID NO: 1187 - protein, 17 aa, synthetic construct
  source 1..17: note = 1D7B4[NKG2D]_H1.30_vhCDR2
SISASGGSTYYADSVKG

SEQ ID NO: 1188 - protein, 12 aa, synthetic construct
  source 1..12: note = 1D7B4[NKG2D]_H1.30_vhCDR3
GIFSIHFFYFDY

SEQ ID NO: 1189 - protein, 121 aa, synthetic construct
  source 1..121: note = 1D7B4[NKG2D]_H1.31_vh
EVQLLESGGGLVQPGGSLRLSCAASGFTFSSYAMSWVRQAPGKGLEWVSSISASGGSTYYADSVKGRFTISRDNSKNTLYLQMNSLRAEDTAVYYCAKGIFSIAFFYFDYWGQGTLVTVSS

SEQ ID NO: 1190 - protein, 5 aa, synthetic construct
  source 1..5: note = 1D7B4[NKG2D]_H1.31_vhCDR1
SYAMS

SEQ ID NO: 1191 - protein, 12 aa, synthetic construct
  source 1..12: note = 1D7B4[NKG2D]_H1.31_vhCDR3
GIFSIAFFYFDY

SEQ ID NO: 1192 - protein, 121 aa, synthetic construct
  source 1..121: note = 1D7B4[NKG2D]_H1.32_vh
EVQLLESGGGLVQPGGSLRLSCAASGFTFSSYAMSWVRQAPGKGLEWVSSISASGGSTYYADSVKGRFTISRDNSKNTLYLQMNSLRAEDTAVYYCAKGIFSISFFYFDYWGQGTLVTVSS

SEQ ID NO: 1193 - protein, 5 aa, synthetic construct
  source 1..5: note = 1D7B4[NKG2D]_H1.32_vhCDR1
SYAMS

SEQ ID NO: 1194 - protein, 17 aa, synthetic construct
  source 1..17: note = 1D7B4[NKG2D]_H1.32_vhCDR2
SISASGGSTYYADSVKG

SEQ ID NO: 1195 - protein, 12 aa, synthetic construct
  source 1..12: note = 1D7B4[NKG2D]_H1.32_vhCDR3
GIFSISFFYFDY

SEQ ID NO: 1196 - protein, 121 aa, synthetic construct
  source 1..121: note = 1D7B4[NKG2D]_H1.33_vh
EVQLLESGGGLVQPGGSLRLSCAASGFTFSSYAMSWVRQAPGKGLEWVSSISASGGSTYYADSVKGRFTISRDNSKNTLYLQMNSLRAEDTAVYYCAKGIFSIEFFYFDYWGQGTLVTVSS

SEQ ID NO: 1197 - protein, 5 aa, synthetic construct
  source 1..5: note = 1D7B4[NKG2D]_H1.33_vhCDR1
SYAMS

SEQ ID NO: 1198 - protein, 17 aa, synthetic construct
  source 1..17: note = 1D7B4[NKG2D]_H1.33_vhCDR2
SISASGGSTYYADSVKG

SEQ ID NO: 1199 - protein, 12 aa, synthetic construct
  source 1..12: note = 1D7B4[NKG2D]_H1.33_vhCDR3
GIFSIEFFYFDY

SEQ ID NO: 1200 - protein, 121 aa, synthetic construct
  source 1..121: note = 1D7B4[NKG2D]_H1.34_vh
EVQLLESGGGLVQPGGSLRLSCAASGFTFSSYAMSWVRQAPGKGLEWVSSISASGGSTYYADSVKGRFTISRDNSKNTLYLQMNSLRAEDTAVYYCAKGIFSIQFFYFDYWGQGTLVTVSS

SEQ ID NO: 1201 - protein, 5 aa, synthetic construct
  source 1..5: note = 1D7B4[NKG2D]_H1.34_vhCDR1
SYAMS

SEQ ID NO: 1202 - protein, 17 aa, synthetic construct
  source 1..17: note = 1D7B4[NKG2D]_H1.34_vhCDR2
SISASGGSTYYADSVKG

SEQ ID NO: 1203 - protein, 12 aa, synthetic construct
  source 1..12: note = 1D7B4[NKG2D]_H1.34_vhCDR3
GIFSIQFFYFDY

SEQ ID NO: 1204 - protein, 121 aa, synthetic construct
  source 1..121: note = 1D7B4[NKG2D]_H1.35_vh
EVQLLESGGGLVQPGGSLRLSCAASGFTFSSYAMSWVRQAPGKGLEWVSSISASGGSTYYADSVKGRFTISRDNSKNTLYLQMNSLRAEDTAVYYCAKGIFSILFFYFDYWGQGTLVTVSS

SEQ ID NO: 1205 - protein, 5 aa, synthetic construct
  source 1..5: note = 1D7B4[NKG2D]_H1.35_vhCDR1
SYAMS

SEQ ID NO: 1206 - protein, 17 aa, synthetic construct
  source 1..17: note = 1D7B4[NKG2D]_H1.35_vhCDR2
SISASGGSTYYADSVKG

SEQ ID NO: 1207 - protein, 12 aa, synthetic construct
  source 1..12: note = 1D7B4[NKG2D]_H1.35_vhCDR3
GIFSILFFYFDY

SEQ ID NO: 1208 - protein, 121 aa, synthetic construct
  source 1..121: note = 1D7B4[NKG2D]_H1.36_vh
EVQLLESGGGLVQPGGSLRLSCAASGFTFSSYAMSWVRQAPGKGLEWVSSISASGGSTYYADSVKGRFTISRDNSKNTLYLQMNSLRAEDTAVYYCAKGIFSIYHFYFDYWGQGTLVTVSS

SEQ ID NO: 1209 - protein, 5 aa, synthetic construct
  source 1..5: note = 1D7B4[NKG2D]_H1.36_vhCDR1
SYAMS

SEQ ID NO: 1210 - protein, 17 aa, synthetic construct
  source 1..17: note = 1D7B4[NKG2D]_H1.36_vhCDR2
SISASGGSTYYADSVKG

SEQ ID NO: 1211 - protein, 12 aa, synthetic construct
  source 1..12: note = 1D7B4[NKG2D]_H1.36_vhCDR3
GIFSIYHFYFDY

SEQ ID NO: 1212 - protein, 121 aa, synthetic construct
  source 1..121: note = 1D7B4[NKG2D]_H1.37_vh
EVQLLESGGGLVQPGGSLRLSCAASGFTFSSYAMSWVRQAPGKGLEWVSSISASGGSTYYADSVKGRFTISRDNSKNTLYLQMNSLRAEDTAVYYCAKGIFSIYAFYFDYWGQGTLVTVSS

SEQ ID NO: 1213 - protein, 5 aa, synthetic construct
  source 1..5: note = 1D7B4[NKG2D]_H1.37_vhCDR1
SYAMS

SEQ ID NO: 1214 - protein, 17 aa, synthetic construct
  source 1..17: note = 1D7B4[NKG2D]_H1.37_vhCDR2
SISASGGSTYYADSVKG

SEQ ID NO: 1215 - protein, 12 aa, synthetic construct
  source 1..12: note = 1D7B4[NKG2D]_H1.37_vhCDR3
GIFSIYAFYFDY

SEQ ID NO: 1216 - protein, 121 aa, synthetic construct
  source 1..121: note = 1D7B4[NKG2D]_H1.38_vh
EVQLLESGGGLVQPGGSLRLSCAASGFTFSSYAMSWVRQAPGKGLEWVSSISASGGSTYYADSVKGRFTISRDNSKNTLYLQMNSLRAEDTAVYYCAKGIFSIYSFYFDYWGQGTLVTVSS

SEQ ID NO: 1217 - protein, 5 aa, synthetic construct
  source 1..5: note = 1D7B4[NKG2D]_H1.38_vhCDR1
SYAMS

SEQ ID NO: 1218 - protein, 17 aa, synthetic construct
  source 1..17: note = 1D7B4[NKG2D]_H1.38_vhCDR2
SISASGGSTYYADSVKG

SEQ ID NO: 1219 - protein, 12 aa, synthetic construct
  source 1..12: note = 1D7B4[NKG2D]_H1.38_vhCDR3
GIFSIYSFYFDY

SEQ ID NO: 1220 - protein, 121 aa, synthetic construct
  source 1..121: note = 1D7B4[NKG2D]_H1.39_vh
EVQLLESGGGLVQPGGSLRLSCAASGFTFSSYAMSWVRQAPGKGLEWVSSISASGGSTYYADSVKGRFTISRDNSKNTLYLQMNSLRAEDTAVYYCAKGIFSIYEFYFDYWGQGTLVTVSS

SEQ ID NO: 1221 - protein, 5 aa, synthetic construct
  source 1..5: note = 1D7B4[NKG2D]_H1.39_vhCDR1
SYAMS

SEQ ID NO: 1222 - protein, 17 aa, synthetic construct
  source 1..17: note = 1D7B4[NKG2D]_H1.39_vhCDR2
SISASGGSTYYADSVKG

SEQ ID NO: 1223 - protein, 12 aa, synthetic construct
  source 1..12: note = 1D7B4[NKG2D]_H1.39_vhCDR3
GIFSIYEFYFDY

SEQ ID NO: 1224 - protein, 121 aa, synthetic construct
  source 1..121: note = 1D7B4[NKG2D]_H1.40_vh
EVQLLESGGGLVQPGGSLRLSCAASGFTFSSYAMSWVRQAPGKGLEWVSSISASGGSTYYADSVKGRFTISRDNSKNTLYLQMNSLRAEDTAVYYCAKGIFSIYQFYFDYWGQGTLVTVSS

SEQ ID NO: 1225 - protein, 5 aa, synthetic construct
  source 1..5: note = 1D7B4[NKG2D]_H1.40_vhCDR1
SYAMS

SEQ ID NO: 1226 - protein, 17 aa, synthetic construct
  source 1..17: note = 1D7B4[NKG2D]_H1.40_vhCDR2
SISASGGSTYYADSVKG

SEQ ID NO: 1227 - protein, 12 aa, synthetic construct
  source 1..12: note = 1D7B4[NKG2D]_H1.40_vhCDR3
GIFSIYQFYFDY

SEQ ID NO: 1228 - protein, 121 aa, synthetic construct
  source 1..121: note = 1D7B4[NKG2D]_H1.41_vh
EVQLLESGGGLVQPGGSLRLSCAASGFTFSSYAMSWVRQAPGKGLEWVSSISASGGSTYYADSVKGRFTISRDNSKNTLYLQMNSLRAEDTAVYYCAKGIFSIYLFYFDYWGQGTLVTVSS

SEQ ID NO: 1229 - protein, 5 aa, synthetic construct
  source 1..5: note = 1D7B4[NKG2D]_H1.41_vhCDR1
SYAMS

SEQ ID NO: 1230 - protein, 17 aa, synthetic construct
  source 1..17: note = 1D7B4[NKG2D]_H1.41_vhCDR2
SISASGGSTYYADSVKG

SEQ ID NO: 1231 - protein, 12 aa, synthetic construct
  source 1..12: note = 1D7B4[NKG2D]_H1.41_vhCDR3
GIFSIYLFYFDY

SEQ ID NO: 1232 - protein, 121 aa, synthetic construct
  source 1..121: note = 1D7B4[NKG2D]_H1.42_vh
EVQLLESGGGLVQPGGSLRLSCAASGFTFSSYAMSWVRQAPGKGLEWVSSISASGGSTYYADSVKGRFTISRDNSKNTLYLQMNSLRAEDTAVYYCAKGIFSIYFHYFDYWGQGTLVTVSS

SEQ ID NO: 1233 - protein, 5 aa, synthetic construct
  source 1..5: note = 1D7B4[NKG2D]_H1.42_vhCDR1
SYAMS

SEQ ID NO: 1234 - protein, 17 aa, synthetic construct
  source 1..17: note = 1D7B4[NKG2D]_H1.42_vhCDR2
SISASGGSTYYADSVKG

SEQ ID NO: 1235 - protein, 12 aa, synthetic construct
  source 1..12: note = 1D7B4[NKG2D]_H1.42_vhCDR3
GIFSIYFHYFDY

SEQ ID NO: 1236 - protein, 121 aa, synthetic construct
  source 1..121: note = 1D7B4[NKG2D]_H1.43_vh
EVQLLESGGGLVQPGGSLRLSCAASGFTFSSYAMSWVRQAPGKGLEWVSSISASGGSTYYADSVKGRFTISRDNSKNTLYLQMNSLRAEDTAVYYCAKGIFSIYFAYFDYWGQGTLVTVSS

SEQ ID NO: 1237 - protein, 5 aa, synthetic construct
  source 1..5: note = 1D7B4[NKG2D]_H1.43_vhCDR1
SYAMS

SEQ ID NO: 1238 - protein, 17 aa, synthetic construct
  source 1..17: note = 1D7B4[NKG2D]_H1.43_vhCDR2
SISASGGSTYYADSVKG

SEQ ID NO: 1239 - protein, 12 aa, synthetic construct
  source 1..12: note = 1D7B4[NKG2D]_H1.43_vhCDR3
GIFSIYFAYFDY

SEQ ID NO: 1240 - protein, 121 aa, synthetic construct
  source 1..121: note = 1D7B4[NKG2D]_H1.44_vh
EVQLLESGGGLVQPGGSLRLSCAASGFTFSSYAMSWVRQAPGKGLEWVSSISASGGSTYYADSVKGRFTISRDNSKNTLYLQMNSLRAEDTAVYYCAKGIFSIYFSYFDYWGQGTLVTVSS

SEQ ID NO: 1241 - protein, 5 aa, synthetic construct
  source 1..5: note = 1D7B4[NKG2D]_H1.44_vhCDR1
SYAMS

SEQ ID NO: 1242 - protein, 17 aa, synthetic construct
  source 1..17: note = 1D7B4[NKG2D]_H1.44_vhCDR2
SISASGGSTYYADSVKG

SEQ ID NO: 1243 - protein, 12 aa, synthetic construct
  source 1..12: note = 1D7B4[NKG2D]_H1.44_vhCDR3
GIFSIYFSYFDY

SEQ ID NO: 1244 - protein, 121 aa, synthetic construct
  source 1..121: note = 1D7B4[NKG2D]_H1.45_vh
EVQLLESGGGLVQPGGSLRLSCAASGFTFSSYAMSWVRQAPGKGLEWVSSISASGGSTYYADSVKGRFTISRDNSKNTLYLQMNSLRAEDTAVYYCAKGIFSIYFEYFDYWGQGTLVTVSS

SEQ ID NO: 1245 - protein, 5 aa, synthetic construct
  source 1..5: note = 1D7B4[NKG2D]_H1.45_vhCDR1
SYAMS

SEQ ID NO: 1246 - protein, 17 aa, synthetic construct
  source 1..17: note = 1D7B4[NKG2D]_H1.45_vhCDR2
SISASGGSTYYADSVKG

SEQ ID NO: 1247 - protein, 12 aa, synthetic construct
  source 1..12: note = 1D7B4[NKG2D]_H1.45_vhCDR3
GIFSIYFEYFDY

SEQ ID NO: 1248 - protein, 121 aa, synthetic construct
  source 1..121: note = 1D7B4[NKG2D]_H1.46_vh
EVQLLESGGGLVQPGGSLRLSCAASGFTFSSYAMSWVRQAPGKGLEWVSSISASGGSTYYADSVKGRFTISRDNSKNTLYLQMNSLRAEDTAVYYCAKGIFSIYFQYFDYWGQGTLVTVSS

SEQ ID NO: 1249 - protein, 5 aa, synthetic construct
  source 1..5: note = 1D7B4[NKG2D]_H1.46_vhCDR1
SYAMS

SEQ ID NO: 1250 - protein, 17 aa, synthetic construct
  source 1..17: note = 1D7B4[NKG2D]_H1.46_vhCDR2
SISASGGSTYYADSVKG

SEQ ID NO: 1251 - protein, 12 aa, synthetic construct
  source 1..12: note = 1D7B4[NKG2D]_H1.46_vhCDR3
GIFSIYFQYFDY

SEQ ID NO: 1252 - protein, 121 aa, synthetic construct
  source 1..121: note = 1D7B4[NKG2D]_H1.47_vh
EVQLLESGGGLVQPGGSLRLSCAASGFTFSSYAMSWVRQAPGKGLEWVSSISASGGSTYYADSVKGRFTISRDNSKNTLYLQMNSLRAEDTAVYYCAKGIFSIYFLYFDYWGQGTLVTVSS

SEQ ID NO: 1253 - protein, 5 aa, synthetic construct
  source 1..5: note = 1D7B4[NKG2D]_H1.47_vhCDR1
SYAMS

SEQ ID NO: 1254 - protein, 17 aa, synthetic construct
  source 1..17: note = 1D7B4[NKG2D]_H1.47_vhCDR2
SISASGGSTYYADSVKG

SEQ ID NO: 1255 - protein, 12 aa, synthetic construct
  source 1..12: note = 1D7B4[NKG2D]_H1.47_vhCDR3
GIFSIYFLYFDY

SEQ ID NO: 1256 - protein, 121 aa, synthetic construct
  source 1..121: note = 1D7B4[NKG2D]_H1.48_vh
EVQLLESGGGLVQPGGSLRLSCAASGFTFSSYAMSWVRQAPGKGLEWVSSISASGGSTYYADSVKGRFTISRDNSKNTLYLQMNSLRAEDTAVYYCAKGIFSIYFFYHDYWGQGTLVTVSS

SEQ ID NO: 1257 - protein, 5 aa, synthetic construct
  source 1..5: note = 1D7B4[NKG2D]_H1.48_vhCDR1
SYAMS

SEQ ID NO: 1258 - protein, 17 aa, synthetic construct
  source 1..17: note = 1D7B4[NKG2D]_H1.48_vhCDR2
SISASGGSTYYADSVKG

SEQ ID NO: 1259 - protein, 12 aa, synthetic construct
  source 1..12: note = 1D7B4[NKG2D]_H1.48_vhCDR3
GIFSIYFFYHDY

SEQ ID NO: 1260 - protein, 121 aa, synthetic construct
  source 1..121: note = 6A1[B7H3]_H1_vh
EVQLLESGGGLVQPGGSLRLSCAASGFTFSNYYMAWVRQAPGKGLEWVSSISTGGGSTYYRDSVKGRFTISRDNSKSTLYLQMNSLRAEDTAVYYCTTDLSAIAATPFAYWGQGTLVTVSS

SEQ ID NO: 1261 - protein, 5 aa, synthetic construct
  source 1..5: note = 6A1[B7H3]_H1_vhCDR1
NYYMA

SEQ ID NO: 1262 - protein, 17 aa, synthetic construct
  source 1..17: note = 6A1[B7H3]_H1_vhCDR2
SISTGGGSTYYRDSVKG

SEQ ID NO: 1263 - protein, 12 aa, synthetic construct
  source 1..12: note = 6A1[B7H3]_H1_vhCDR3
DLSAIAATPFAY

SEQ ID NO: 1264 - protein, 106 aa, synthetic construct
  source 1..106: note = 6A1[B7H3]_L1_vl
DIQMTQSPSSLSASVGDRVTITCRASQNIYTSLAWYQQKPGKAPKLLIYNAHSLQTGIPSRFSGSGSGADFTLTISSLQPEDFATYFCQQYYSGLTFGSGTKLEIK

SEQ ID NO: 1265 - protein, 11 aa, synthetic construct
  source 1..11: note = 6A1[B7H3]_L1_vlCDR1
RASQNIYTSLA

SEQ ID NO: 1266 - protein, 7 aa, synthetic construct
  source 1..7: note = 6A1[B7H3]_L1_vlCDR2
NAHSLQT

SEQ ID NO: 1267 - protein, 8 aa, synthetic construct
  source 1..8: note = 6A1[B7H3]_L1_vlCDR3
QQYYSGLT

SEQ ID NO: 1268 - protein, 119 aa, synthetic construct
  source 1..119: note = 3C4[B7H3]_H1_vh
QVQLVQSGAEVKKPGASVKVSCKVSGFSLTSYHVSWVRQAPGQGLEWMGAISSGGSSYYNSKFQGRVTMTRDTSTSTVYMELSSLRSEDTAVYFCTGDLGAAISWFAYWGQGTLVTVSS

SEQ ID NO: 1269 - protein, 10 aa, synthetic construct
  source 1..10: note = 3C4[B7H3]_H1_vhCDR1
GFSLTSYHVS

SEQ ID NO: 1270 - protein, 16 aa, synthetic construct
  source 1..16: note = 3C4[B7H3]_H1_vhCDR2
AISSGGSSYYNSKFQG

SEQ ID NO: 1271 - protein, 11 aa, synthetic construct
  source 1..11: note = 3C4[B7H3]_H1_vhCDR3
DLGAAISWFAY

SEQ ID NO: 1272 - protein, 106 aa, synthetic construct
  source 1..106: note = 3C4[B7H3]_L1.1_vl
DIQMTQSPSSLSASVGDRVTITCRTSQSIYKSLAWYQQKPGKAPKLLIYNAHSLQTGIPSRFSGSGSGTDFTLTISSLQPEDFATYFCQQYYSGLTFGSGTKLEIK

SEQ ID NO: 1273 - protein, 11 aa, synthetic construct
  source 1..11: note = 3C4[B7H3]_L1.1_vlCDR1
RTSQSIYKSLA

SEQ ID NO: 1274 - protein, 7 aa, synthetic construct
  source 1..7: note = 3C4[B7H3]_L1.1_vlCDR2
NAHSLQT

SEQ ID NO: 1275 - protein, 8 aa, synthetic construct
  source 1..8: note = 3C4[B7H3]_L1.1_vlCDR3
QQYYSGLT

SEQ ID NO: 1276 - protein, 122 aa, synthetic construct
  source 1..122: note = 4F12[B7H3]_H2_vh
EVQLVESGGGLVKPGGSLRLSCAASGFSFSVGYYMCWVRQAPGKGLEWVSCIYVGSGSSGSTYYASVKGRFTISSDTAKTSVYLQMNSLRAEDTAVYFCARTAGSDWRLDLWGQGTLVTVSS

SEQ ID NO: 1277 - protein, 6 aa, synthetic construct
  source 1..6: note = 4F12[B7H3]_H2_vhCDR1
VGYYMC

SEQ ID NO: 1278 - protein, 19 aa, synthetic construct
  source 1..19: note = 4F12[B7H3]_H2_vhCDR2
CIYVGSGSSGSTYYASVKG

SEQ ID NO: 1279 - protein, 10 aa, synthetic construct
  source 1..10: note = 4F12[B7H3]_H2_vhCDR3
TAGSDWRLDL

SEQ ID NO: 1280 - protein, 108 aa, synthetic construct
  source 1..108: note = 4F12[B7H3]_L1.1_vl
DIVMTQSPSSLSASVGDRVTITCRASQSIANELSWYQQKPGKPPKLLIYRASTLTSGVPSRFKGSGSGTDFTLTISSLQPEDFATYYCQSTYNGRAIGFGGGTKVEIK

SEQ ID NO: 1281 - protein, 11 aa, synthetic construct
  source 1..11: note = 4F12[B7H3]_L1.1_vlCDR1
RASQSIANELS

SEQ ID NO: 1282 - protein, 7 aa, synthetic construct
  source 1..7: note = 4F12[B7H3]_L1.1_vlCDR2
RASTLTS

SEQ ID NO: 1283 - protein, 10 aa, synthetic construct
  source 1..10: note = 4F12[B7H3]_L1.1_vlCDR3
QSTYNGRAIG

SEQ ID NO: 1284 - protein, 117 aa, synthetic construct
  source 1..117: note = 38E2[B7H3]_H2_vh
EVQLLESGGGLVQPGGSLRLSCAVSGFSLSSYGVIWVRQAPGKGLEYVSWVSSGGSTNYASSVKGRFTISRDTSKNTVYLQMNSLRAEDTAVYFCARGATNSGTDIWGPGTLVTVSS

SEQ ID NO: 1285 - protein, 5 aa, synthetic construct
  source 1..5: note = 38E2[B7H3]_H2_vhCDR1
SYGVI

SEQ ID NO: 1286 - protein, 16 aa, synthetic construct
  source 1..16: note = 38E2[B7H3]_H2_vhCDR2
WVSSGGSTNYASSVKG

SEQ ID NO: 1287 - protein, 9 aa, synthetic construct
  source 1..9: note = 38E2[B7H3]_H2_vhCDR3
GATNSGTDI

SEQ ID NO: 1288 - protein, 110 aa, synthetic construct
  source 1..110: note = 38E2[B7H3]_L1.1_vl
DIVMTQSPSSLSASVGDRVTITCRASQSINSWLSWYQQKPGKPPKLLIYGASNLASGVPSRFKGSGSGTDFTLTISSLQPEDFATYYCQNNYGIIAAGATFGGGTKVEIK

SEQ ID NO: 1289 - protein, 11 aa, synthetic construct
  source 1..11: note = 38E2[B7H3]_L1.1_vlCDR1
RASQSINSWLS

SEQ ID NO: 1290 - protein, 7 aa, synthetic construct
  source 1..7: note = 38E2[B7H3]_L1.1_vlCDR2
GASNLAS

SEQ ID NO: 1291 - protein, 12 aa, synthetic construct
  source 1..12: note = 38E2[B7H3]_L1.1_vlCDR3
QNNYGIIAAGAT

SEQ ID NO: 1292 - protein, 119 aa, synthetic construct
  source 1..119: note = 2E4A3.189[B7H3]_H1_vh
QVQLVQSGAEVKKPGASVKVSCKASGYIFTNYYMHWVRQAPGQGLEWMGIISPSAGTTSYAQKFQGRVTMTRDTSTSTVYMELSSLRSEDTAVYYCARGGGSSPRLDYWGQGTLVTVSS

SEQ ID NO: 1293 - protein, 5 aa, synthetic construct
  source 1..5: note = 2E4A3.189[B7H3]_H1_vhCDR1
NYYMH

SEQ ID NO: 1294 - protein, 17 aa, synthetic construct
  source 1..17: note = 2E4A3.189[B7H3]_H1_vhCDR2
IISPSAGTTSYAQKFQG

SEQ ID NO: 1295 - protein, 10 aa, synthetic construct
  source 1..10: note = 2E4A3.189[B7H3]_H1_vhCDR3
GGGSSPRLDY

SEQ ID NO: 1296 - protein, 107 aa, synthetic construct; identical to SEQ ID NO: 915
  source 1..107: note = 2E4A3.189[B7H3]_L1_vl

SEQ ID NO: 1297 - protein, 11 aa, synthetic construct
  source 1..11: note = 2E4A3.189[B7H3]_L1_vlCDR1
RASQSISSYLN

SEQ ID NO: 1298 - protein, 7 aa, synthetic construct
  source 1..7: note = 2E4A3.189[B7H3]_L1_vlCDR2
AASSLQS

SEQ ID NO: 1299 - protein, 9 aa, synthetic construct
  source 1..9: note = 2E4A3.189[B7H3]_L1_vlCDR3
QQSYSTPYT

SEQ ID NO: 1300 - protein, 119 aa, synthetic construct
  source 1..119: note = 2E4A3.189[B7H3]_H1.1
QVQLVQSGAEVKKPGASVKVSCKASGYTFTNNYMHWVRQAPGQGLEWMGIISPSSGRTSYAQKFQGRVTMTRDTSTSTVYMELSSLRSEDTAVYYCARGGGSSPRLDYWGQGTLVTVSS

SEQ ID NO: 1301 - protein, 119 aa, synthetic construct
  source 1..119: note = 2E4A3.189[B7H3]_H1.2
QVQLVQSGAEVKKPGASVKVSCKASGYTFTDHYMHWVRQAPGQGLEWMGIISPSSGRTSYAQKFQGRVTMTRDTSTSTVYMELSSLRSEDTAVYYCARGGGSSPRLDYWGQGTLVTVSS

SEQ ID NO: 1302 - protein, 119 aa, synthetic construct
  source 1..119: note = 2E4A3.189[B7H3]_H1.3
QVQLVQSGAEVKKPGASVKVSCKASGYIFTNHYMHWVRQAPGQGLEWMGIISPSAGSTDYAQKFQGRVTMTRDTSTSTVYMELSSLRSEDTAVYYCARGGGSSPRLDYWGQGTLVTVSS

SEQ ID NO: 1303 - protein, 119 aa, synthetic construct
  source 1..119: note = 2E4A3.189[B7H3]_H1.4
QVQLVQSGAEVKKPGASVKVSCKASGYPFTNHYMHWVRQAPGQGLEWMGIISPSVGTTSYAQKFQGRVTMTRDTSTSTVYMELSSLRSEDTAVYYCARGGGSSPRLDYWGQGTLVTVSS

SEQ ID NO: 1304 - protein, 119 aa, synthetic construct
  source 1..119: note = 2E4A3.189[B7H3]_H1.5
QVQLVQSGAEVKKPGASVKVSCKASGYTFTDHYMHWVRQAPGQGLEWMGIISPSAGSTSYAQKFQGRVTMTRDTSTSTVYMELSSLRSEDTAVYYCARGGGSSPRLDYWGQGTLVTVSS

SEQ ID NO: 1305 - protein, 119 aa, synthetic construct
  source 1..119: note = 2E4A3.189[B7H3]_H1.6
QVQLVQSGAEVKKPGASVKVSCKASGYIFTDYYMHWVRQAPGQGLEWMGIISPSGGSTDYAQKFQGRVTMTRDTSTSTVYMELSSLRSEDTAVYYCARGGGSSPRLDYWGQGTLVTVSS

SEQ ID NO: 1306 - protein, 119 aa, synthetic construct
  source 1..119: note = 2E4A3.189[B7H3]_H1.7
QVQLVQSGAEVKKPGASVKVSCKASGYTFTQNYMHWVRQAPGQGLEWMGIISPSAGSTAYAQKFQGRVTMTRDTSTSTVYMELSSLRSEDTAVYYCARGGGSSPRLDYWGQGTLVTVSS

SEQ ID NO: 1307 - protein, 119 aa, synthetic construct
  source 1..119: note = 2E4A3.189[B7H3]_H1.8
QVQLVQSGAEVKKPGASVKVSCKASGYTFTDNYMHWVRQAPGQGLEWMGIISPSAGSTNYAQKFQGRVTMTRDTSTSTVYMELSSLRSEDTAVYYCARGGGSSPRLDYWGQGTLVTVSS

SEQ ID NO: 1308 - protein, 119 aa, synthetic construct
  source 1..119: note = 2E4A3.189[B7H3]_H1.9
QVQLVQSGAEVKKPGASVKVSCKASGYTFTDNYMHWVRQAPGQGLEWMGIISPSAGSTIYAQKFQGRVTMTRDTSTSTVYMELSSLRSEDTAVYYCARGGGSSPRLDYWGQGTLVTVSS

SEQ ID NO: 1309 - protein, 119 aa, synthetic construct
  source 1..119: note = 2E4A3.189[B7H3]_H1.10
QVQLVQSGAEVKKPGASVKVSCKASGYTFTNHYMHWVRQAPGQGLEWMGIISPSVGSTSYAQKFQGRVTMTRDTSTSTVYMELSSLRSEDTAVYYCARGGGSSPRLDYWGQGTLVTVSS

SEQ ID NO: 1310 - protein, 119 aa, synthetic construct
  source 1..119: note = 2E4A3.189[B7H3]_H1.11
QVQLVQSGAEVKKPGASVKVSCKASGYTFIDFYMHWVRQAPGQGLEWMGIISPSGGSTDYAQKFQGRVTMTRDTSTSTVYMELSSLRSEDTAVYYCARGGGSSPRLDYWGQGTLVTVSS

SEQ ID NO: 1311 - protein, 119 aa, synthetic construct
  source 1..119: note = 2E4A3.189[B7H3]_H1.12
QVQLVQSGAEVKKPGASVKVSCKASGYTFTNHYMHWVRQAPGQGLEWMGIISPSVGTTSYAQKFQGRVTMTRDTSTSTVYMELSSLRSEDTAVYYCARGGGSSPRLDYWGQGTLVTVSS

SEQ ID NO: 1312 - protein, 119 aa, synthetic construct
  source 1..119: note = 2E4A3.189[B7H3]_H1.13
QVQLVQSGAEVKKPGASVKVSCKASGYPFTDHYMHWVRQAPGQGLEWMGIISPSAGSTSYAQKFQGRVTMTRDTSTSTVYMELSSLRSEDTAVYYCARGGGSSPRLDYWGQGTLVTVSS

SEQ ID NO: 1313 - protein, 119 aa, synthetic construct
  source 1..119: note = 2E4A3.189[B7H3]_H1.14
QVQLVQSGAEVKKPGASVKVSCKASGYTFTENYMHWVRQAPGQGLEWMGIISPSAGTTSYAQKFQGRVTMTRDTSTSTVYMELSSLRSEDTAVYYCARGGGSSPRLDYWGQGTLVTVSS

SEQ ID NO: 1314 - protein, 119 aa, synthetic construct
  source 1..119: note = 2E4A3.189[B7H3]_H1.15
QVQLVQSGAEVKKPGASVKVSCKASGYTFINHYMHWVRQAPGQGLEWMGIISPSAGSTNYAQKFQGRVTMTRDTSTSTVYMELSSLRSEDTAVYYCARGGGSSPRLDYWGQGTLVTVSS

SEQ ID NO: 1315 - protein, 119 aa, synthetic construct
  source 1..119: note = 2E4A3.189[B7H3]_H1.16
QVQLVQSGAEVKKPGASVKVSCKASGYTFTEFYMHWVRQAPGQGLEWMGIISPSGGSTDYAQKFQGRVTMTRDTSTSTVYMELSSLRSEDTAVYYCARGGGSSPRLDYWGQGTLVTVSS

SEQ ID NO: 1316 - protein, 119 aa, synthetic construct
  source 1..119: note = 2E4A3.189[B7H3]_H1.17
QVQLVQSGAEVKKPGASVKVSCKASGYTFTDNYMHWVRQAPGQGLEWMGIISPSAGSTAYAQKFQGRVTMTRDTSTSTVYMELSSLRSEDTAVYYCARGGGSSPRLDYWGQGTLVTVSS

SEQ ID NO: 1317 - protein, 119 aa, synthetic construct
  source 1..119: note = 2E4A3.189[B7H3]_H1.18
QVQLVQSGAEVKKPGASVKVSCKASGYIFTNHYMHWVRQAPGQGLEWMGIISPSVGTTSYAQKFQGRVTMTRDTSTSTVYMELSSLRSEDTAVYYCARGGGSSPRLDYWGQGTLVTVSS

SEQ ID NO: 1318 - protein, 119 aa, synthetic construct
  source 1..119: note = 2E4A3.189[B7H3]_H1.19
QVQLVQSGAEVKKPGASVKVSCKASGYTFINNYMHWVRQAPGQGLEWMGIISPSAGSTAYAQKFQGRVTMTRDTSTSTVYMELSSLRSEDTAVYYCARGGGSSPRLDYWGQGTLVTVSS

SEQ ID NO: 1319 - protein, 119 aa, synthetic construct
  source 1..119: note = 2E4A3.189[B7H3]_H1.20
QVQLVQSGAEVKKPGASVKVSCKASGYIFTNNYMHWVRQAPGQGLEWMGIISPSVGRTSYAQKFQGRVTMTRDTSTSTVYMELSSLRSEDTAVYYCARGGGSSPRLDYWGQGTLVTVSS

SEQ ID NO: 1320 - protein, 119 aa, synthetic construct
  source 1..119: note = 2E4A3.189[B7H3]_H1.21
QVQLVQSGAEVKKPGASVKVSCKASGYAFTDNYMHWVRQAPGQGLEWMGIISPSAGSTAYAQKFQGRVTMTRDTSTSTVYMELSSLRSEDTAVYYCARGGGSSPRLDYWGQGTLVTVSS

SEQ ID NO: 1321 - protein, 119 aa, synthetic construct
  source 1..119: note = 2E4A3.189[B7H3]_H1.22
QVQLVQSGAEVKKPGASVKVSCKASGYIFTNNYMHWVRQAPGQGLEWMGIISPSVGRTAYAQKFQGRVTMTRDTSTSTVYMELSSLRSEDTAVYYCARGGGSSPRLDYWGQGTLVTVSS

SEQ ID NO: 1322 - protein, 119 aa, synthetic construct
  source 1..119: note = 2E4A3.189[B7H3]_H1.23
QVQLVQSGAEVKKPGASVKVSCKASGYAFTNHYMHWVRQAPGQGLEWMGIISPSVGTTSYAQKFQGRVTMTRDTSTSTVYMELSSLRSEDTAVYYCARGGGSSPRLDYWGQGTLVTVSS

SEQ ID NO: 1323 - protein, 119 aa, synthetic construct
  source 1..119: note = 2E4A3.189[B7H3]_H1.24
QVQLVQSGAEVKKPGASVKVSCKASGYIFTDNYMHWVRQAPGQGLEWMGIISPSGGSTAYAQKFQGRVTMTRDTSTSTVYMELSSLRSEDTAVYYCARGGGSSPRLDYWGQGTLVTVSS

SEQ ID NO: 1324 - protein, 119 aa, synthetic construct
  source 1..119: note = 2E4A3.189[B7H3]_H1.25
QVQLVQSGAEVKKPGASVKVSCKASGYAFTDNYMHWVRQAPGQGLEWMGIISPSAGSTDYAQKFQGRVTMTRDTSTSTVYMELSSLRSEDTAVYYCARGGGSSPRLDYWGQGTLVTVSS

SEQ ID NO: 1325 - protein, 119 aa, synthetic construct
  source 1..119: note = 2E4A3.189[B7H3]_H1.26
QVQLVQSGAEVKKPGASVKVSCKASGYIFTNNYMHWVRQAPGQGLEWMGIISPSVGTTSYAQKFQGRVTMTRDTSTSTVYMELSSLRSEDTAVYYCARGGGSSPRLDYWGQGTLVTVSS

SEQ ID NO: 1326 - protein, 119 aa, synthetic construct
  source 1..119: note = 2E4A3.189[B7H3]_H1.27
QVQLVQSGAEVKKPGASVKVSCKASGYAFTNNYMHWVRQAPGQGLEWMGIISPSVGTTSYAQKFQGRVTMTRDTSTSTVYMELSSLRSEDTAVYYCARGGGSSPRLDYWGQGTLVTVSS

SEQ ID NO: 1327 - protein, 119 aa, synthetic construct
  source 1..119: note = 2E4A3.189[B7H3]_H1.28
QVQLVQSGAEVKKPGASVKVSCKASGYSFTDNYMHWVRQAPGQGLEWMGIISPSAGSTAYAQKFQGRVTMTRDTSTSTVYMELSSLRSEDTAVYYCARGGGSSPRLDYWGQGTLVTVSS

SEQ ID NO: 1328 - protein, 119 aa, synthetic construct
  source 1..119: note = 2E4A3.189[B7H3]_H1.29
QVQLVQSGAEVKKPGASVKVSCKASGYAFTNHYMHWVRQAPGQGLEWMGIISPSAGSTAYAQKFQGRVTMTRDTSTSTVYMELSSLRSEDTAVYYCARGGGSSPRLDYWGQGTLVTVSS

SEQ ID NO: 1329 - protein, 119 aa, synthetic construct
  source 1..119: note = 2E4A3.189[B7H3]_H1.30
QVQLVQSGAEVKKPGASVKVSCKASGYTFTNNYMHWVRQAPGQGLEWMGIISPSAGSTAYAQKFQGRVTMTRDTSTSTVYMELSSLRSEDTAVYYCARGGGSSPRLDYWGQGTLVTVSS

SEQ ID NO: 1330 - protein, 119 aa, synthetic construct
  source 1..119: note = 2E4A3.189[B7H3]_H1.31
QVQLVQSGAEVKKPGASVKVSCKASGYTFINNYMHWVRQAPGQGLEWMGIISPSGGSTAYAQKFQGRVTMTRDTSTSTVYMELSSLRSEDTAVYYCARGGGSSPRLDYWGQGTLVTVSS

SEQ ID NO: 1331 - protein, 119 aa, synthetic construct
  source 1..119: note = 2E4A3.189[B7H3]_H1.32
QVQLVQSGAEVKKPGASVKVSCKASGYSFTNNYMHWVRQAPGQGLEWMGIISPSTGRTSYAQKFQGRVTMTRDTSTSTVYMELSSLRSEDTAVYYCARGGGSSPRLDYWGQGTLVTVSS

SEQ ID NO: 1332 - protein, 119 aa, synthetic construct
  source 1..119: note = 2E4A3.189[B7H3]_H1.33
QVQLVQSGAEVKKPGASVKVSCKASGYTFTDNYMHWVRQAPGQGLEWMGIISPSVGTTSYAQKFQGRVTMTRDTSTSTVYMELSSLRSEDTAVYYCARGGGSSPRLDYWGQGTLVTVSS

SEQ ID NO: 1333 - protein, 119 aa, synthetic construct
  source 1..119: note = 2E4A3.189[B7H3]_H1.34
QVQLVQSGAEVKKPGASVKVSCKASGYTFTDNYMHWVRQAPGQGLEWMGIISPSGGSTAYAQKFQGRVTMTRDTSTSTVYMELSSLRSEDTAVYYCARGGGSSPRLDYWGQGTLVTVSS

SEQ ID NO: 1334 - protein, 119 aa, synthetic construct
  source 1..119: note = 2E4A3.189[B7H3]_H1.35
QVQLVQSGAEVKKPGASVKVSCKASGYTFTDNYMHWVRQAPGQGLEWMGIISPSVGTTAYAQKFQGRVTMTRDTSTSTVYMELSSLRSEDTAVYYCARGGGSSPRLDYWGQGTLVTVSS

SEQ ID NO: 1335 - protein, 119 aa, synthetic construct
  source 1..119: note = 2E4A3.189[B7H3]_H1.36
QVQLVQSGAEVKKPGASVKVSCKASGYPFINHYMHWVRQAPGQGLEWMGIISPSSGRTAYAQKFQGRVTMTRDTSTSTVYMELSSLRSEDTAVYYCARGGGSSPRLDYWGQGTLVTVSS

SEQ ID NO: 1336 - protein, 119 aa, synthetic construct
  source 1..119: note = 2E4A3.189[B7H3]_H1.37
QVQLVQSGAEVKKPGASVKVSCKASGYTFTNHYMHWVRQAPGQGLEWMGIISPSAGSTAYAQKFQGRVTMTRDTSTSTVYMELSSLRSEDTAVYYCARGGGSSPRLDYWGQGTLVTVSS

SEQ ID NO: 1337 - protein, 119 aa, synthetic construct
  source 1..119: note = 2E4A3.189[B7H3]_H1.38
QVQLVQSGAEVKKPGASVKVSCKASGYSFTNHYMHWVRQAPGQGLEWMGIISPSVGRTSYAQKFQGRVTMTRDTSTSTVYMELSSLRSEDTAVYYCARGGGSSPRLDYWGQGTLVTVSS

SEQ ID NO: 1338 - protein, 119 aa, synthetic construct
  source 1..119: note = 2E4A3.189[B7H3]_H1.39
QVQLVQSGAEVKKPGASVKVSCKASGYTFINHYMHWVRQAPGQGLEWMGIISPSAGSTAYAQKFQGRVTMTRDTSTSTVYMELSSLRSEDTAVYYCARGGGSSPRLDYWGQGTLVTVSS

SEQ ID NO: 1339 - protein, 119 aa, synthetic construct
  source 1..119: note = 2E4A3.189[B7H3]_H1.40
QVQLVQSGAEVKKPGASVKVSCKASGYSFTDNYMHWVRQAPGQGLEWMGIISPSGGSTAYAQKFQGRFTMTRDTSTSTVYMELSSLRSEDTAVYYCARGGGSSPRLDYWGQGTLVTVSS

SEQ ID NO: 1340 - protein, 119 aa, synthetic construct
  source 1..119: note = 2E4A3.189[B7H3]_H1.41
QVQLVQSGAEVKKPGASVKVSCKASGYIFTDNYMHWVRQAPGQGLEWMGIISPSAGSTAYAQKFQGRVTMTRDTSTSTVYMELSSLRSEDTAVYYCARGGGSSPRLDYWGQGTLVTVSS

SEQ ID NO: 1341 - protein, 119 aa, synthetic construct
  source 1..119: note = 2E4A3.189[B7H3]_H1.42
QVQLVQSGAEVKKPGASVKVSCKASGYTFIDNYMHWVRQAPGQGLEWMGIISPSVGTTSYAQKFQGRVTMTRDTSTSTVYMELSSLRSEDTAVYYCARGGGSSPRLDYWGQGTLVTVSS

SEQ ID NO: 1342 - protein, 119 aa, synthetic construct
  source 1..119: note = 2E4A3.189[B7H3]_H1.43
QVQLVQSGAEVKKPGASVKVSCKASGYSFTDNYMHWVRQAPGQGLEWMGIISPSSGRTSYAQKFQGRVTMTRDTSTSTVYMELSSLRSEDTAVYYCARGGGSSPRLDYWGQGTLVTVSS

SEQ ID NO: 1343 - protein, 119 aa, synthetic construct
  source 1..119: note = 2E4A3.189[B7H3]_H1.44
QVQLVQSGAEVKKPGASVKVSCKASGYIFTNNYMHWVRQAPGQGLEWMGIISPSAGTTSYAQKFQGRVTMTRDTSTSTVYMELSSLRSEDTAVYYCARGGGSSPRLDYWGQGTLVTVSS

SEQ ID NO: 1344 - protein, 119 aa, synthetic construct
  source 1..119: note = 2E4A3.189[B7H3]_H1.45
QVQLVQSGAEVKKPGASVKVSCKASGYAFTDNYMHWVRQAPGQGLEWMGIISPSVGTTSYAQKFQGRVTMTRDTSTSTVYMELSSLRSEDTAVYYCARGGGSSPRLDYWGQGTLVTVSS

SEQ ID NO: 1345 - protein, 119 aa, synthetic construct
  source 1..119: note = 2E4A3.189[B7H3]_H1.46
QVQLVQSGAEVKKPGASVKVSCKASGYSFTNNYMHWVRQAPGQGLEWMGIISPSVGTTSYAQKFQGRVTMTRDTSTSTVYMELSSLRSEDTAVYYCARGGGSSPRLDYWGQGTLVTVSS

SEQ ID NO: 1346 - protein, 119 aa, synthetic construct
  source 1..119: note = 2E4A3.189[B7H3]_H1.47
QVQLVQSGAEVKKPGASVKVSCKASGYIFTDHYMHWVRQAPGQGLEWMGIISPSAGSTAYAQKFQGRVTMTRDTSTSTVYMELSSLRSEDTAVYYCARGGGSSPRLDYWGQGTLVTVSS

SEQ ID NO: 1347 - protein, 119 aa, synthetic construct
  source 1..119: note = 2E4A3.189[B7H3]_H1.48
QVQLVQSGAEVKKPGASVKVSCKASGYSFTDNYMHWVRQAPGQGLEWMGIISPSAGTTSYAQKFQGRVTMTRDTSTSTVYMELSSLRSEDTAVYYCARGGGSSPRLDYWGQGTLVTVSS

SEQ ID NO: 1348 - protein, 119 aa, synthetic construct
  source 1..119: note = 2E4A3.189[B7H3]_H1.49
QVQLVQSGAEVKKPGASVKVSCKASGYSFTDNYMHWVRQAPGQGLEWMGIISPSVGTTSYAQKFQGRVTMTRDTSTSTVYMELSSLRSEDTAVYYCARGGGSSPRLDYWGQGTLVTVSS

SEQ ID NO: 1349 - protein, 119 aa, synthetic construct
  source 1..119: note = 2E4A3.189[B7H3]_H1.50
QVQLVQSGAEVKKPGASVKVSCKASGYSFTNNYMHWVRQAPGQGLEWMGIISPSAGTTSYAQKFQGRVTMTRDTSTSTVYMELSSLRSEDTAVYYCARGGGSSPRLDYWGQGTLVTVSS

SEQ ID NO: 1350 - protein, 119 aa, synthetic construct
  source 1..119: note = 2E4A3.189[B7H3]_H1.51
QVQLVQSGAEVKKPGASVKVSCKASGYTFTDNYMHWVRQAPGQGLEWMGIISPSAGTTSYAQKFQGRVTMTRDTSTSTVYMELSSLRSEDTAVYYCARGGGSSPRLDYWGQGTLVTVSS

SEQ ID NO: 1351 - protein, 119 aa, synthetic construct
  source 1..119: note = 2E4A3.189[B7H3]_H1.52
QVQLVQSGAEVKKPGASVKVSCKASGYSFTDHYMHWVRQAPGQGLEWMGIISPSSGRTDYAQKFQGRVTMTRDTSTSTVYMELSSLRSEDTAVYYCARGGGSSPRLDYWGQGTLVTVSS

SEQ ID NO: 1352 - protein, 119 aa, synthetic construct
  source 1..119: note = 2E4A3.189[B7H3]_H1.53
QVQLVQSGAEVKKPGASVKVSCKASGYTFTNNYMHWVRQAPGQGLEWMGIISPSGGSTAYAQKFQGRVTMTRDTSTSTVYMELSSLRSEDTAVYYCARGGGSSPRLDYWGQGTLVTVSS

SEQ ID NO: 1353 - protein, 119 aa, synthetic construct
  source 1..119: note = 2E4A3.189[B7H3]_H1.54
QVQLVQSGAEVKKPGASVKVSCKASGYTFIDNYMHWVRQAPGQGLEWMGIISPSAGSTAYAQKFQGRVTMTRDTSTSTVYMELSSLRSEDTAVYYCARGGGSSPRLDYWGQGTLVTVSS

SEQ ID NO: 1354 - protein, 119 aa, synthetic construct
  source 1..119: note = 2E4A3.189[B7H3]_H1.55
QVQLVQSGAEVKKPGASVKVSCKASGYIFTDNYMHWVRQAPGQGLEWMGIISPSVGTTSYAQKFQGRVTMTRDTSTSTVYMELSSLRSEDTAVYYCARGGGSSPRLDYWGQGTLVTVSS

SEQ ID NO: 1355 - protein, 119 aa, synthetic construct
  source 1..119: note = 2E4A3.189[B7H3]_H1.56
QVQLVQSGAEVKKPGASVKVSCKASGYTFTNNYMHWVRQAPGQGLEWMGIISPSAGTTSYAQKFQGRVTMTRDTSTSTVYMELSSLRSEDTAVYYCARGGGSSPRLDYWGQGTLVTVSS

SEQ ID NO: 1356 - protein, 119 aa, synthetic construct
  source 1..119: note = 2E4A3.189[B7H3]_H1.57
QVQLVQSGAEVKKPGASVKVSCKASGYIFTNHYMHWVRQAPGQGLEWMGIISPSAGTTSYAQKFQGRVTMTRDTSTSTVYMELSSLRSEDTAVYYCARGGGSSPRLDYWGQGTLVTVSS

SEQ ID NO: 1357 - protein, 119 aa, synthetic construct
  source 1..119: note = 2E4A3.189[B7H3]_H1.58
QVQLVQSGAEVKKPGASVKVSCKASGYTFTNHYMHWVRQAPGQGLEWMGIISPSAGTTSYAQKFQGRVTMTRDTSTSTVYMELSSLRSEDTAVYYCARGGGSSPRLDYWGQGTLVTVSS

SEQ ID NO: 1358 - protein, 119 aa, synthetic construct
  source 1..119: note = 2E4A3.189[B7H3]_H1.59
QVQLVQSGAEVKKPGASVKVSCKASGYPFTNNYMHWVRQAPGQGLEWMGIISPSVGTTSYAQKFQGRVTMTRDTSTSTVYMELSSLRSEDTAVYYCARGGGSSPRLDYWGQGTLVTVSS

SEQ ID NO: 1359 - protein, 119 aa, synthetic construct
  source 1..119: note = 2E4A3.189[B7H3]_H1.60
QVQLVQSGAEVKKPGASVKVSCKASGYTFTDNYMHWVRQAPGQGLEWMGIISPSGGTTAYAQKFQGRVTMTRDTSTSTVYMELSSLRSEDTAVYYCARGGGSSPRLDYWGQGTLVTVSS

SEQ ID NO: 1360 - protein, 119 aa, synthetic construct
  source 1..119: note = 2E4A3.189[B7H3]_H1.61
QVQLVQSGAEVKKPGASVKVSCKASGYTFINNYMHWVRQAPGQGLEWMGIISPIAGSTDYAQKFQGRVTMTRDTSTSTVYMELSSLRSEDTAVYYCARGGGSSPRLDYWGQGTLVTVSS

SEQ ID NO: 1361 - protein, 119 aa, synthetic construct
  source 1..119: note = 2E4A3.189[B7H3]_H1.62
QVQLVQSGAEVKKPGASVKVSCKASGYAFTNNYMHWVRQAPGQGLEWMGIISPSVGRTAYAQKFQGRVTMTRDTSTSTVYMELSSLRSEDTAVYYCARGGGSSPRLDYWGQGTLVTVSS

SEQ ID NO: 1362 - protein, 119 aa, synthetic construct
  source 1..119: note = 2E4A3.189[B7H3]_H1.63
QVQLVQSGAEVKKPGASVKVSCKASGYIFTNNYMHWVRQAPGQGLEWMGIIAPSVGRTAYAQKFQGRVTMTRDTSTSTVYMELSSLRSEDTAVYYCARGGGSSPRLDYWGQGTLVTVSS

SEQ ID NO: 1363 - protein, 119 aa, synthetic construct; identical to SEQ ID NO: 1319
  source 1..119: note = 2E4A3.189[B7H3]_H1.64

SEQ ID NO: 1364 - protein, 119 aa, synthetic construct
  source 1..119: note = 2E4A3.189[B7H3]_H1.65
QVQLVQSGAEVKKPGASVKVSCKASGYIFTNNYMHWVRQAPGQGLEWMGIISPVVGRTAYAQKFQGRVTMTRDTSTSTVYMELSSLRSEDTAVYYCARGGGSSPRLDYWGQGTLVTVSS

SEQ ID NO: 1365 - protein, 119 aa, synthetic construct
  source 1..119: note = 2E4A3.189[B7H3]_H1.66
QVQLVQSGAEVKKPGASVKVSCKASGYGFTNNYMHWVRQAPGQGLEWMGIISPLVGRTAYAQKFQGRVTMTRDTSTSTVYMELSSLRSEDTAVYYCARGGGSSPRLDYWGQGTLVTVSS

SEQ ID NO: 1366 - protein, 119 aa, synthetic construct
  source 1..119: note = 2E4A3.189[B7H3]_H1.67
QVQLVQSGAEVKKPGASVKVSCKASGYIFTNNYMHWVRQAPGQGLEWMGIISPLVGRTAYAQKFQGRVTMTRDTSTSTVYMELSSLRSEDTAVYYCARGGGSSPRLDYWGQGTLVTVSS

SEQ ID NO: 1367 - protein, 119 aa, synthetic construct
  source 1..119: note = 2E4A3.189[B7H3]_H1.68
QVQLVQSGAEVKKPGASVKVSCKASGYLFTNNYMHWVRQAPGQGLEWMGIISPSVGRTAYAQKFQGRVTMTRDTSTSTVYMELSSLRSEDTAVYYCARGGGSSPRLDYWGQGTLVTVSS

SEQ ID NO: 1368 - protein, 119 aa, synthetic construct
  source 1..119: note = 2E4A3.189[B7H3]_H1.69
QVQLVQSGAEVKKPGASVKVSCKASGYIFTNNYMHWVRQAPGQGLEWMGIISPQVGRTAYAQKFQGRVTMTRDTSTSTVYMELSSLRSEDTAVYYCARGGGSSPRLDYWGQGTLVTVSS

SEQ ID NO: 1369 - protein, 119 aa, synthetic construct
  source 1..119: note = 2E4A3.189[B7H3]_H1.70
QVQLVQSGAEVKKPGASVKVSCKASGYFFTNNYMHWVRQAPGQGLEWMGIISPLVGRTAYAQKFQGRVTMTRDTSTSTVYMELSSLRSEDTAVYYCARGGGSSPRLDYWGQGTLVTVSS

SEQ ID NO: 1370 - protein, 119 aa, synthetic construct
  source 1..119: note = 2E4A3.189[B7H3]_H1.71
QVQLVQSGAEVKKPGASVKVSCKASGYIFTNNYMHWVRQAPGQGLEWMGIISPSVGRTAYAQKFQGRVTMTRDTSTSTVYMELSSLRSEDTAVYYCARGGGSSPRSDYWGQGTLVTVSS

SEQ ID NO: 1371 - protein, 119 aa, synthetic construct
  source 1..119: note = 2E4A3.189[B7H3]_H1.72
QVQLVQSGAEVKKPGASVKVSCKASGYIFVINYMHWVRQAPGQGLEWMGIISPAVGRTAYAQKFQGRVTMTRDTSTSTVYMELSSLRSEDTAVYYCARGGGSSPRLDYWGQGTLVTVSS

SEQ ID NO: 1372 - protein, 119 aa, synthetic construct
  source 1..119: note = 2E4A3.189[B7H3]_H1.73
QVQLVQSGAEVKKPGASVKVSCKASGYIFTNNYMHWVRQAPGQGLEWMGIISPSVGRTAYAQKFQGRVTMTRDTSTSTVYMELSSLRSEDTAVYYCARGGFSSPRVDYWGQGTLVTVSS

SEQ ID NO: 1373 - protein, 119 aa, synthetic construct
  source 1..119: note = 2E4A3.189[B7H3]_H1.74
QVQLVQSGAEVKKPGASVKVSCKASGYSFKNNYMHWVRQAPGQGLEWMGIISPLVGRTAYAQKFQGRVTMTRDTSTSTVYMELSSLRSEDTAVYYCARGGGSSPRLDYWGQGTLVTVSS

SEQ ID NO: 1374 - protein, 119 aa, synthetic construct
  source 1..119: note = 2E4A3.189[B7H3]_H1.75
QVQLVQSGAEVKKPGASVKVSCKASGYIFTNNYMHWVRQAPGQGLEWMGIISPSVGRTAYAQKFQGRVTMTRDTSTSTVYMELSSLRSEDTAVYYCARGGGSSPRGDYWGQGTLVTVSS

SEQ ID NO: 1375 - protein, 119 aa, synthetic construct
  source 1..119: note = 2E4A3.189[B7H3]_H1.76
QVQLVQSGAEVKKPGASVKVSCKASGYIFTNNYMHWVRQAPGQGLEWMGIISPSVGRTAYAQKFQGRVTMTRDTSTSTVYMELSSLRSEDTAVYYCARGGGSSPRVDYWGQGTLVTVSS

SEQ ID NO: 1376 - protein, 119 aa, synthetic construct
  source 1..119: note = 2E4A3.189[B7H3]_H1.77
QVQLVQSGAEVKKPGASVKVSCKASGYGFTNNYMHWVRQAPGQGLEWMGIISPVVGRTAYAQKFQGRVTMTRDTSTSTVYMELSSLRSEDTAVYYCARGGGSSPRLDYWGQGTLVTVSS

SEQ ID NO: 1377 - protein, 119 aa, synthetic construct
  source 1..119: note = 2E4A3.189[B7H3]_H1.78
QVQLVQSGAEVKKPGASVKVSCKASGYIFTNNYMHWVRQAPGQGLEWMGIISPSVGRTAYAQKFQGRVTMTRDTSTSTVYMELSSLRSEDTAVYYCARAGWSSPRLDYWGQGTLVTVSS

SEQ ID NO: 1378 - protein, 119 aa, synthetic construct
  source 1..119: note = 2E4A3.189[B7H3]_H1.79
QVQLVQSGAEVKKPGASVKVSCKASGYIFENNYMHWVRQAPGQGLEWMGIISPSVGRWAYAQKFQGRVTMTRDTSTSTVYMELSSLRSEDTAVYYCARGGGSSPRLDYWGQGTLVTVSS

SEQ ID NO: 1379 - protein, 119 aa, synthetic construct
  source 1..119: note = 2E4A3.189[B7H3]_H1.80
QVQLVQSGAEVKKPGASVKVSCKASGYIFTNVYMHWVRQAPGQGLEWMGIIFPGVGRTAYAQKFQGRVTMTRDTSTSTVYMELSSLRSEDTAVYYCARGGGSSPRLDYWGQGTLVTVSS

SEQ ID NO: 1380 - protein, 119 aa, synthetic construct
  source 1..119: note = 2E4A3.189[B7H3]_H1.81
QVQLVQSGAEVKKPGASVKVSCKASGYIFVFNYMHWVRQAPGQGLEWMGIISPSVGRTDYAQKFQGRVTMTRDTSTSTVYMELSSLRSEDTAVYYCARGGGSSPRLDYWGQGTLVTVSS

SEQ ID NO: 1381 - protein, 119 aa, synthetic construct
  source 1..119: note = 2E4A3.189[B7H3]_H1.82
QVQLVQSGAEVKKPGASVKVSCKASGYIFTNNYMHWVRQAPGQGLEWMGIISPSVGRTAYAQKFQGRVTMTRDTSTSTVYMELSSLRSEDTAVYYCARGGLSSPRQDYWGQGTLVTVSS

SEQ ID NO: 1382 - protein, 119 aa, synthetic construct
  source 1..119: note = 2E4A3.189[B7H3]_H1.83
QVQLVQSGAEVKKPGASVKVSCKASGYIFVNNYMHWVRQAPGQGLEWMGIISPSVGRILYAQKFQGRVTMTRDTSTSTVYMELSSLRSEDTAVYYCARGGGSSPRLDYWGQGTLVTVSS

SEQ ID NO: 1383 - protein, 119 aa, synthetic construct
  source 1..119: note = 2E4A3.189[B7H3]_H1.84
QVQLVQSGAEVKKPGASVKVSCKASGYIFSNNYMHWVRQAPGQGLEWMGIISPSVGRTQYAQKFQGRVTMTRDTSTSTVYMELSSLRSEDTAVYYCARGGGSSPRLDYWGQGTLVTVSS

SEQ ID NO: 1384 - protein, 119 aa, synthetic construct
  source 1..119: note = 2E4A3.189[B7H3]_H1.85
QVQLVQSGAEVKKPGASVKVSCKASGYIFTNNYMHWVRQAPGQGLEWMGIISPSVGRTAYAQKFQGRVTMTRDTSTSTVYMELSSLRSEDTAVYYCARGGMSSPRVDYWGQGTLVTVSS

SEQ ID NO: 1385 - protein, 119 aa, synthetic construct
  source 1..119: note = 2E4A3.189[B7H3]_H1.86
QVQLVQSGAEVKKPGASVKVSCKASGLGFTNNYMHWVRQAPGQGLEWMGILSPAVGRTAYAQKFQGRVTMTRDTSTSTVYMELSSLRSEDTAVYYCARGGGSSPRLDYWGQGTLVTVSS

SEQ ID NO: 1386 - protein, 119 aa, synthetic construct
  source 1..119: note = 2E4A3.189[B7H3]_H1.87
QVQLVQSGAEVKKPGASVKVSCKASGYIFTNNYMHWVRQAPGQGLEWMGIIGPAVGRTAYAQKFQGRVTMTRDTSTSTVYMELSSLRSEDTAVYYCARGGGSSPRLDYWGQGTLVTVSS

SEQ ID NO: 1387 - protein, 119 aa, synthetic construct
  source 1..119: note = 2E4A3.189[B7H3]_H1.88
QVQLVQSGAEVKKPGASVKVSCKASGYIFTNNYMHWVRQAPGQGLEWMGILSPVVGRTAYAQKFQGRVTMTRDTSTSTVYMELSSLRSEDTAVYYCARGGGSSPRLDYWGQGTLVTVSS

SEQ ID NO: 1388 - protein, 120 aa, synthetic construct
  source 1..120: note = omburtamab_vh
VHQVQLQQSGAELVKPGASVKLSCKASGYTFTNYDINWVRQRPEQGLEWIGWIFPGDGSTQYNEKFKGKATLTTDTSSSTAYMQLSRLTSEDSAVYFCARQTTATWFAYWGQGTLVTVSA

SEQ ID NO: 1389 - protein, 5 aa, synthetic construct
  source 1..5: note = omburtamab_vhCDR1
NYDIN

SEQ ID NO: 1390 - protein, 17 aa, synthetic construct
  source 1..17: note = omburtamab_vhCDR2
WIFPGDGSTQYNEKFKG

SEQ ID NO: 1391 - protein, 9 aa, synthetic construct
  source 1..9: note = omburtamab_vhCDR3
QTTATWFAY

SEQ ID NO: 1392 - protein, 109 aa, synthetic construct
  source 1..109: note = omburtamab_vl
VLDIVMTQSPATLSVTPGDRVSLSCRASQSISDYLHWYQQKSHESPRLLIKYASQSISGIPSRFSGSGSGSDFTLSINSVEPEDVGVYYCQNGHSFPLTFGAGTKLELK

SEQ ID NO: 1393 - protein, 11 aa, synthetic construct
  source 1..11: note = omburtamab_vlCDR1
RASQSISDYLH

SEQ ID NO: 1394 - protein, 7 aa, synthetic construct
  source 1..7: note = omburtamab_vlCDR2
YASQSIS

SEQ ID NO: 1395 - protein, 9 aa, synthetic construct
  source 1..9: note = omburtamab_vlCDR3
QNGHSFPLT

SEQ ID NO: 1396 - protein, 120 aa, synthetic construct
  source 1..120: note = 8H9_vh
VHQVKLQQSGAELVKPGASVKLSCKASGYTFTNYDINWVRQRPEQGLEWIGWIFPGDGSTQYNEKFKGKATLTTDTSSSTAYMQLSRLTSEDSAVYFCARQTTATWFAYWGQGTTVTVSS

SEQ ID NO: 1397 - protein, 5 aa, synthetic construct
  source 1..5: note = 8H9_vhCDR1
NYDIN

SEQ ID NO: 1398 - protein, 17 aa, synthetic construct
  source 1..17: note = 8H9_vhCDR2
WIFPGDGSTQYNEKFKG

SEQ ID NO: 1399 - protein, 9 aa, synthetic construct
  source 1..9: note = 8H9_vhCDR3
QTTATWFAY

SEQ ID NO: 1400 - protein, 109 aa, synthetic construct
  source 1..109: note = 8H9_vl
VLDIELTQSPTTLSVTPGDRVSLSCRASQSISDYLHWYQQKSHESPRLLIKYASQSISGIPSRFSGSGSGSDFTLSINSVEPEDVGVYYCQNGHSFPLTFGAGTKLELK

SEQ ID NO: 1401 - protein, 11 aa, synthetic construct
  source 1..11: note = 8H9_vlCDR1
RASQSISDYLH

SEQ ID NO: 1402 - protein, 7 aa, synthetic construct
  source 1..7: note = 8H9_vlCDR2
YASQSIS

SEQ ID NO: 1403 - protein, 9 aa, synthetic construct
  source 1..9: note = 8H9_vlCDR3
QNGHSFPLT

SEQ ID NO: 1404 - protein, 124 aa, synthetic construct
  source 1..124: note = enoblituzumab_vh
VHEVQLVESGGGLVQPGGSLRLSCAASGFTFSSFGMHWVRQAPGKGLEWVAYISSDSSAIYYADTVKGRFTISRDNAKNSLYLQMNSLRDEDTAVYYCGRGRENIYYGSRLDYWGQGTTVTVSS

SEQ ID NO: 1405 - protein, 5 aa, synthetic construct
  source 1..5: note = enoblituzumab_vhCDR1
SFGMH

SEQ ID NO: 1406 - protein, 17 aa, synthetic construct
  source 1..17: note = enoblituzumab_vhCDR2
YISSDSSAIYYADTVKG

SEQ ID NO: 1407 - protein, 13 aa, synthetic construct
  source 1..13: note = enoblituzumab_vhCDR3
GRENIYYGSRLDY

SEQ ID NO: 1408 - protein, 109 aa, synthetic construct
  source 1..109: note = enoblituzumab_vl
VLDIQLTQSPSFLSASVGDRVTITCKASQNVDTNVAWYQQKPGKAPKALIYSASYRYSGVPSRFSGSGSGTDFTLTISSLQPEDFATYYCQQYNNYPFTFGQGTKLEIK

SEQ ID NO: 1409 - protein, 11 aa, synthetic construct
  source 1..11: note = enoblituzumab_vlCDR1
KASQNVDTNVA

SEQ ID NO: 1410 - protein, 7 aa, synthetic construct
  source 1..7: note = enoblituzumab_vlCDR2
SASYRYS

SEQ ID NO: 1411 - protein, 9 aa, synthetic construct
  source 1..9: note = enoblituzumab_vlCDR3
QQYNNYPFT

SEQ ID NO: 1412 - protein, 124 aa, synthetic construct
  source 1..124: note = BRCA84D_vh
VHDVQLVESGGGLVQPGGSRKLSCAASGFTFSSFGMHWVRQAPEKGLEWVAYISSDSSAIYYADTVKGRFTISRDNPKNTLFLQMTSLRSEDTAMYYCGRGRENIYYGSRLDYWGQGTTLTVSS

SEQ ID NO: 1413 - protein, 5 aa, synthetic construct
  source 1..5: note = BRCA84D_vhCDR1
SFGMH

SEQ ID NO: 1414 - protein, 17 aa, synthetic construct
  source 1..17: note = BRCA84D_vhCDR2
YISSDSSAIYYADTVKG

SEQ ID NO: 1415 - protein, 13 aa, synthetic construct
  source 1..13: note = BRCA84D_vhCDR3
GRENIYYGSRLDY

SEQ ID NO: 1416 - protein, 109 aa, synthetic construct
  source 1..109: note = BRCA84D_vl
VLDIAMTQSQKFMSTSVGDRVSVTCKASQNVDTNVAWYQQKPGQSPKALIYSASYRYSGVPDRFTGSGSGTDFTLTINNVQSEDLAEYFCQQYNNYPFTFGSGTKLEIK

SEQ ID NO: 1417 - protein, 11 aa, synthetic construct
  source 1..11: note = BRCA84D_vlCDR1
KASQNVDTNVA

SEQ ID NO: 1418 - protein, 7 aa, synthetic construct
  source 1..7: note = BRCA84D_vlCDR2
SASYRYS

SEQ ID NO: 1419 - protein, 9 aa, synthetic construct
  source 1..9: note = BRCA84D_vlCDR3
QQYNNYPFT

SEQ ID NO: 1420 - protein, 122 aa, synthetic construct
  source 1..122: note = BRCA69D_vh
VHQVQLQQSGAELARPGASVKLSCKASGYTFTSYWMQWVKQRPGQGLEWIGTIYPGDGDTRYTQKFKGKATLTADKSSSTAYMQLSSLASEDSAVYYCARRGIPRLWYFDVWGAGTTVTVSS

SEQ ID NO: 1421 - protein, 5 aa, synthetic construct
  source 1..5: note = BRCA69D_vhCDR1
SYWMQ

SEQ ID NO: 1422 - protein, 17 aa, synthetic construct
  source 1..17: note = BRCA69D_vhCDR2
TIYPGDGDTRYTQKFKG

SEQ ID NO: 1423 - protein, 11 aa, synthetic construct
  source 1..11: note = BRCA69D_vhCDR3
RGIPRLWYFDV

SEQ ID NO: 1424 - protein, 109 aa, synthetic construct
  source 1..109: note = BRCA69D_vl
VLDIQMTQTTSSLSASLGDRVTISCRASQDISNYLNWYQQKPDGTVKLLIYYTSRLHSGVPSRFSGSGSGTDYSLTIDNLEQEDIATYFCQQGNTLPPTFGGGTKLEIK

SEQ ID NO: 1425 - protein, 11 aa, synthetic construct
  source 1..11: note = BRCA69D_vlCDR1
RASQDISNYLN

SEQ ID NO: 1426 - protein, 7 aa, synthetic construct
  source 1..7: note = BRCA69D_vlCDR2
YTSRLHS

SEQ ID NO: 1427 - protein, 9 aa, synthetic construct
  source 1..9: note = BRCA69D_vlCDR3
QQGNTLPPT

SEQ ID NO: 1428 - protein, 119 aa, synthetic construct
  source 1..119: note = PRCA157_vh
VHEVQQVESGGDLVKPGGSLKLSCAASGFTFSSYGMSWVRQTPDKRLEWVATINSGGSNTYYPDSLKGRFTISRDNAKNTLYLQMRSLKSEDTAMYYCARHDGGAMDYWGQGTSVTVSS

SEQ ID NO: 1429 - protein, 5 aa, synthetic construct
  source 1..5: note = PRCA157_vhCDR1
SYGMS

SEQ ID NO: 1430 - protein, 17 aa, synthetic construct
  source 1..17: note = PRCA157_vhCDR2
TINSGGSNTYYPDSLKG

SEQ ID NO: 1431 - protein, 8 aa, synthetic construct
  source 1..8: note = PRCA157_vhCDR3
HDGGAMDY

SEQ ID NO: 1432 - protein, 110 aa, synthetic construct
  source 1..110: note = PRCA157_vl
VLDIQMTQSPASLSVSVGETVTITCRASESIYSYLAWYQQKQGKSPQLLVYNTKTLPEGVPSRFSGSGSGTQFSLKINSLQPEDFGRYYCQHHYGTPPWTFGGGTNLEIK

SEQ ID NO: 1433 - protein, 11 aa, synthetic construct
  source 1..11: note = PRCA157_vlCDR1
RASESIYSYLA

SEQ ID NO: 1434 - protein, 7 aa, synthetic construct
  source 1..7: note = PRCA157_vlCDR2
NTKTLPE

SEQ ID NO: 1435 - protein, 10 aa, synthetic construct
  source 1..10: note = PRCA157_vlCDR3
QHHYGTPPWT

SEQ ID NO: 1436 - protein, 119 aa, synthetic construct
  source 1..119: note = huPRCA157_vh
VHEVQLVESGGGLVKPGGSLRLSCAASGFTFSSYGMSWVRQAPGKGLEWVATINSGGSNTYYPDSLKGRFTISRDNAKNSLYLQMNSLRAEDTAVYYCARHDGGAMDYWGQGTTVTVSS

SEQ ID NO: 1437 - protein, 5 aa, synthetic construct
  source 1..5: note = huPRCA157_vhCDR1
SYGMS

SEQ ID NO: 1438 - protein, 17 aa, synthetic construct
  source 1..17: note = huPRCA157_vhCDR2
TINSGGSNTYYPDSLKG

SEQ ID NO: 1439 - protein, 8 aa, synthetic construct
  source 1..8: note = huPRCA157_vhCDR3
HDGGAMDY

SEQ ID NO: 1440 - protein, 110 aa, synthetic construct
  source 1..110: note = huPRCA157_vl
VLDIQMTQSPSSLSASVGDRVTITCRASESIYSYLAWYQQKPGKAPKLLVYNTKTLPEGVPSRFSGSGSGTDFTLTISSLQPEDFATYYCQHHYGTPPWTFGQGTRLEIK

SEQ ID NO: 1441 - protein, 11 aa, synthetic construct
  source 1..11: note = huPRCA157_vlCDR1
RASESIYSYLA

SEQ ID NO: 1442 - protein, 7 aa, synthetic construct
  source 1..7: note = huPRCA157_vlCDR2
NTKTLPE

SEQ ID NO: 1443 - protein, 10 aa, synthetic construct
  source 1..10: note = huPRCA157_vlCDR3
QHHYGTPPWT

SEQ ID NO: 1444 - protein, 121 aa, synthetic construct
  source 1..121: note = mAb-D_vh
VHDVQLAESGGGLVQPGGSRKLSCAASGFTFSSFGMHWVRQAPEKGLEWVAYISSGSGTIYYADTVKGRFTISRDNPKNSLFLQMTSLRSEDTAMYYCARHGYRYEGFDYWGQGTTLTVSS

SEQ ID NO: 1445 - protein, 5 aa, synthetic construct
  source 1..5: note = mAb-D_vhCDR1
SFGMH

SEQ ID NO: 1446 - protein, 17 aa, synthetic construct
  source 1..17: note = mAb-D_vhCDR2
YISSGSGTIYYADTVKG

SEQ ID NO: 1447 - protein, 10 aa, synthetic construct
  source 1..10: note = mAb-D_vhCDR3
HGYRYEGFDY

SEQ ID NO: 1448 - protein, 109 aa, synthetic construct
  source 1..109: note = mAb-D_vl
VLDIVMTQSQKFMSTSVGDRVSVTCKASQNVDTNVAWYQQKQGHSPEALIYSASYRYSGVPARFTGSGSGTDFTLTISNVQSEDLAEYFCQQYNNYPFTFGGGTKLEIK

SEQ ID NO: 1449 - protein, 11 aa, synthetic construct
  source 1..11: note = mAb-D_vlCDR1
KASQNVDTNVA

SEQ ID NO: 1450 - protein, 7 aa, synthetic construct
  source 1..7: note = mAb-D_vlCDR2
SASYRYS

SEQ ID NO: 1451 - protein, 9 aa, synthetic construct
  source 1..9: note = mAb-D_vlCDR3
QQYNNYPFT

SEQ ID NO: 1452 - protein, 121 aa, synthetic construct
  source 1..121: note = humAb-D_vh
VHEVQLVESGGGLVQPGGSLRLSCAASGFTFSSFGMHWVRQAPGKGLEWVAYISSGSGTIYYADTVKGRFTISRDNAKNSLYLQMNSLRAEDTAVYYCARHGYRYEGFDYWGQGTTVTVSS

SEQ ID NO: 1453 - protein, 5 aa, synthetic construct
  source 1..5: note = humAb-D_vhCDR1
SFGMH

SEQ ID NO: 1454 - protein, 17 aa, synthetic construct
  source 1..17: note = humAb-D_vhCDR2
YISSGSGTIYYADTVKG

SEQ ID NO: 1455 - protein, 10 aa, synthetic construct
  source 1..10: note = humAb-D_vhCDR3
HGYRYEGFDY

SEQ ID NO: 1456 - protein, 109 aa, synthetic construct
  source 1..109: note = humAb-D_vl
VLDIQMTQSPSFLSASVGDRVTITCKASQNVDTNVAWYQQKPGKAPKALIYSASYRYSGVPSRFSGSGSGTDFTLTISSLQPEDFAEYFCQQYNNYPFTFGQGTKLEIK

SEQ ID NO: 1457 - protein, 11 aa, synthetic construct
  source 1..11: note = humAb-D_vlCDR1
KASQNVDTNVA

SEQ ID NO: 1458 - protein, 7 aa, synthetic construct
  source 1..7: note = humAb-D_vlCDR2
SASYRYS

SEQ ID NO: 1459 - protein, 9 aa, synthetic construct
  source 1..9: note = humAb-D_vlCDR3
QQYNNYPFT

SEQ ID NO: 1460 - protein, 124 aa, synthetic construct
  source 1..124: note = M30_vh
VHEVQLQQSGPELVKPGASVKMSCKASGYTFTNYVMHWVKQKPGQGLEWIGYINPYNDDVKYNEKFKGKATQTSDKSSSTAYMELSSLTSEDSAVYYCARWGYYGSPLYYFDYWGQGTTLTVSS

SEQ ID NO: 1461 - protein, 5 aa, synthetic construct
  source 1..5: note = M30_vhCDR1
NYVMH

SEQ ID NO: 1462 - protein, 17 aa, synthetic construct
  source 1..17: note = M30_vhCDR2
YINPYNDDVKYNEKFKG

SEQ ID NO: 1463 - protein, 13 aa, synthetic construct
  source 1..13: note = M30_vhCDR3
WGYYGSPLYYFDY

SEQ ID NO: 1464 - protein, 108 aa, synthetic construct
  source 1..108: note = M30_vl
VLQIVLSQSPTILSASPGEKVTMTCRASSRLIYMHWYQQKPGSSPKPWIYATSNLASGVPARFSGSGSGTSYSLTISRVEAEDAATYYCQQWNSNPPTFGTGTKLELK

SEQ ID NO: 1465 - protein, 10 aa, synthetic construct
  source 1..10: note = M30_vlCDR1
RASSRLIYMH

SEQ ID NO: 1466 - protein, 7 aa, synthetic construct
  source 1..7: note = M30_vlCDR2
ATSNLAS

SEQ ID NO: 1467 - protein, 9 aa, synthetic construct
  source 1..9: note = M30_vlCDR3
QQWNSNPPT

SEQ ID NO: 1468 - protein, 124 aa, synthetic construct
  source 1..124: note = M30-H1-L4_vh
VHQVQLVQSGAEVKKPGSSVKVSCKASGYTFTNYVMHWVRQAPGQGLEWMGYINPYNDDVKYNEKFKGRVTITADESTSTAYMELSSLRSEDTAVYYCARWGYYGSPLYYFDYWGQGTLVTVSS

SEQ ID NO: 1469 - protein, 5 aa, synthetic construct
  source 1..5: note = M30-H1-L4_vhCDR1
NYVMH

SEQ ID NO: 1470 - protein, 17 aa, synthetic construct
  source 1..17: note = M30-H1-L4_vhCDR2
YINPYNDDVKYNEKFKG

SEQ ID NO: 1471 - protein, 13 aa, synthetic construct
  source 1..13: note = M30-H1-L4_vhCDR3
WGYYGSPLYYFDY

SEQ ID NO: 1472 - protein, 108 aa, synthetic construct
  source 1..108: note = M30-H1-L4_vl
VLQIVLSQSPATLSLSPGERATLTCRASSRLIYMHWYQQKPGSAPKLWIYATSNLASGIPARFSGSGSGTSYTLTISRLEPEDFAVYYCQQWNSNPPTFGQGTKVEIK

SEQ ID NO: 1473 - protein, 10 aa, synthetic construct
  source 1..10: note = M30-H1-L4_vlCDR1
RASSRLIYMH

SEQ ID NO: 1474 - protein, 7 aa, synthetic construct
  source 1..7: note = M30-H1-L4_vlCDR2
ATSNLAS

SEQ ID NO: 1475 - protein, 9 aa, synthetic construct
  source 1..9: note = M30-H1-L4_vlCDR3
QQWNSNPPT

SEQ ID NO: 1476 - protein, 122 aa, synthetic construct
  source 1..122: note = SP265_vh
VHQSVEESRGGLIKPTDTLTLTCTVSGFSLGSYGVSWVRQAPGNGLEWIGGSGKRGNPYYASWAKSRSTITRNTNLNTVTLKMTSLTAADTATYFCASRAPVVSTSMTFNIWGPGTLVTVSS

SEQ ID NO: 1477 - protein, 5 aa, synthetic construct
  source 1..5: note = SP265_vhCDR1
SYGVS

SEQ ID NO: 1478 - protein, 16 aa, synthetic construct
  source 1..16: note = SP265_vhCDR2
GSGKRGNPYYASWAKS

SEQ ID NO: 1479 - protein, 13 aa, synthetic construct
  source 1..13: note = SP265_vhCDR3
RAPVVSTSMTFNI

SEQ ID NO: 1480 - protein, 115 aa, synthetic construct
  source 1..115: note = SP265_vl
VLAQVPTQTPSPVSAAVGGTVTINCQASQSVYNNKNLSWYQQKPGQPPKLLIYEASTLASGVPSRFSGSGSGTQFALTISGVQCEDAATYYCQGEFTCSGADCGAFGGGTEVVVK

SEQ ID NO: 1481 - protein, 13 aa, synthetic construct
  source 1..13: note = SP265_vlCDR1
QASQSVYNNKNLS

SEQ ID NO: 1482 - protein, 7 aa, synthetic construct
  source 1..7: note = SP265_vlCDR2
EASTLAS

SEQ ID NO: 1483 - protein, 13 aa, synthetic construct
  source 1..13: note = SP265_vlCDR3
QGEFTCSGADCGA

SEQ ID NO: 1484 - protein, 124 aa, synthetic construct
  source 1..124: note = S10-H50L58_vh
VHQEQLEESGGDLVKPGASLTLTCTASGFSFSSSYWICWVRQAPGKGLEWIACIYAGSSLNTYYAPWAKGRFTISKTSSATVTLQMTSLTAADTATYSCARTVVGGWGYALDLWGPGTLVTVSS

SEQ ID NO: 1485 - protein, 6 aa, synthetic construct
  source 1..6: note = S10-H50L58_vhCDR1
SSYWIC

SEQ ID NO: 1486 - protein, 18 aa, synthetic construct
  source 1..18: note = S10-H50L58_vhCDR2
CIYAGSSLNTYYAPWAKG

SEQ ID NO: 1487 - protein, 12 aa, synthetic construct
  source 1..12: note = S10-H50L58_vhCDR3
TVVGGWGYALDL

SEQ ID NO: 1488 - protein, 114 aa, synthetic construct
  source 1..114: note = S10-H50L58_vl
VLQVLTQTPSPVSAAVGGTVTINCQASQSVYNNKNLSWYQQKPGQPPKLLIYEASTLASGVPSRFSGSGSGTQFALTISGVQCEDAATYYCQGEFTCSGADCGAFGGGTEVVVK

SEQ ID NO: 1489 - protein, 13 aa, synthetic construct
  source 1..13: note = S10-H50L58_vlCDR1
QASQSVYNNKNLS

SEQ ID NO: 1490 - protein, 7 aa, synthetic construct
  source 1..7: note = S10-H50L58_vlCDR2
EASTLAS

SEQ ID NO: 1491 - protein, 13 aa, synthetic construct
  source 1..13: note = S10-H50L58_vlCDR3
QGEFTCSGADCGA

SEQ ID NO: 1492 - protein, 122 aa, synthetic construct
  source 1..122: note = m852_vh
VHQVQLQQSGAEVKKPGSSVKVSCKASGGTFSSYAISWVRQAPGQGLEWMGGIIPILGIANYAQKFQGRVTITADESTSTAYMELSSLRSEDTAVYYCARGRRSGSYYMGYWGQGTLVTVSS

SEQ ID NO: 1493 - protein, 5 aa, synthetic construct
  source 1..5: note = m852_vhCDR1
SYAIS

SEQ ID NO: 1494 - protein, 17 aa, synthetic construct
  source 1..17: note = m852_vhCDR2
GIIPILGIANYAQKFQG

SEQ ID NO: 1495 - protein, 11 aa, synthetic construct
  source 1..11: note = m852_vhCDR3
GRRSGSYYMGY

SEQ ID NO: 1496 - protein, 111 aa, synthetic construct
  source 1..111: note = m852_vl
VLEIVLTQSPATLSLSPGERATLSCRASQSVSSNLAWYQQKPGQAPRLLIYDTSTRATGIPARFSGSGSGTEFTLTISSLQSEDFAVYYCQQYNNWPPAYTFGQGTKLEIK

SEQ ID NO: 1497 - protein, 11 aa, synthetic construct
  source 1..11: note = m852_vlCDR1
RASQSVSSNLA

SEQ ID NO: 1498 - protein, 7 aa, synthetic construct
  source 1..7: note = m852_vlCDR2
DTSTRAT

SEQ ID NO: 1499 - protein, 11 aa, synthetic construct
  source 1..11: note = m852_vlCDR3
QQYNNWPPAYT

SEQ ID NO: 1500 - protein, 121 aa, synthetic construct
  source 1..121: note = m857_vh
VHQVQLQQSGAEVKKPGSSVKVSCKASGGTFSSYAISWVRQAPGQGLEWMGGIIPILGIANYAQKFQGRVTITADESTSTAYMELSSLRSEDTAVYYCATGGSGSYAFDIWGQGTMVTVSS

SEQ ID NO: 1501 - protein, 5 aa, synthetic construct
  source 1..5: note = m857_vhCDR1
SYAIS

SEQ ID NO: 1502 - protein, 17 aa, synthetic construct
  source 1..17: note = m857_vhCDR2
GIIPILGIANYAQKFQG

SEQ ID NO: 1503 - protein, 10 aa, synthetic construct
  source 1..10: note = m857_vhCDR3
GGSGSYAFDI

SEQ ID NO: 1504 - protein, 111 aa, synthetic construct
  source 1..111: note = m857_vl
VLEIVLTQSPATLSLSPGERATLSCRASQSVSSYLAWYQQKPGQAPRLLIYDASNRATGIPARFSGSGSGTDFTLTISSLEPEDFAVYYCQQRSNWPPSYTFGQGTKLEIK

SEQ ID NO: 1505 - protein, 11 aa, synthetic construct
  source 1..11: note = m857_vlCDR1
RASQSVSSYLA

SEQ ID NO: 1506 - protein, 7 aa, synthetic construct
  source 1..7: note = m857_vlCDR2
DASNRAT

SEQ ID NO: 1507 - protein, 11 aa, synthetic construct
  source 1..11: note = m857_vlCDR3
QQRSNWPPSYT

SEQ ID NO: 1508 - protein, 121 aa, synthetic construct
  source 1..121: note = m8524_vh
VHQVQLQQSGAEVKKPGSSVKVSCKASGGTFSSYAISWVRQAPGQGLEWMGGIIPILGIANYAQKFQGRVTITADESTSTAYMELSSLRSEDTAVYYCARGGSGSYHMDVWGKGTTVTVSS

SEQ ID NO: 1509 - protein, 5 aa, synthetic construct
  source 1..5: note = m8524_vhCDR1
SYAIS

SEQ ID NO: 1510 - protein, 17 aa, synthetic construct
  source 1..17: note = m8524_vhCDR2
GIIPILGIANYAQKFQG

SEQ ID NO: 1511 - protein, 10 aa, synthetic construct
  source 1..10: note = m8524_vhCDR3
GGSGSYHMDV

SEQ ID NO: 1512 - protein, 111 aa, synthetic construct
  source 1..111: note = m8524_vl
VLEIVLTQSPATLSLSPGERATLSCRASQSVSSYLAWYQQKPGQAPRLLIYDASNRATGIPARFSGSGSGTDFTLTISSLEPEDFAVYYCQQRSNWPPRITFGQGTRLEIK

SEQ ID NO: 1513 - protein, 11 aa, synthetic construct
  source 1..11: note = m8524_vlCDR1
RASQSVSSYLA

SEQ ID NO: 1514 - protein, 7 aa, synthetic construct
  source 1..7: note = m8524_vlCDR2
DASNRAT

SEQ ID NO: 1515 - protein, 11 aa, synthetic construct
  source 1..11: note = m8524_vlCDR3
QQRSNWPPRIT

SEQ ID NO: 1516 - protein, 120 aa, synthetic construct
  source 1..120: note = 1-1_vh
VHQVQLQQSGAEVKKPGASVKVSCKASGYTFTNYDINWVRQAPGQGLEWIGWIFPGDGSTQYNGKFKGRATLTTDTSTSTAYMELSSLRSEDTAVYFCARQTTGTWFAYWGQGTLVTVSS

SEQ ID NO: 1517 - protein, 5 aa, synthetic construct
  source 1..5: note = 1-1_vhCDR1
NYDIN

SEQ ID NO: 1518 - protein, 17 aa, synthetic construct
  source 1..17: note = 1-1_vhCDR2
WIFPGDGSTQYNGKFKG

SEQ ID NO: 1519 - protein, 9 aa, synthetic construct
  source 1..9: note = 1-1_vhCDR3
QTTGTWFAY

SEQ ID NO: 1520 - protein, 109 aa, synthetic construct
  source 1..109: note = 1-1_vl
VLDIVLTQSPATLSLSPGERATLSCRASQSISPYLHWYQQKPGQAPRLLIKYASQSWSGIPARFSGSGSGSDFTLTISSLEPEDFAVYYCQNGHSFPLTFGGGTKVEIK

SEQ ID NO: 1521 - protein, 11 aa, synthetic construct
  source 1..11: note = 1-1_vlCDR1
RASQSISPYLH

SEQ ID NO: 1522 - protein, 7 aa, synthetic construct
  source 1..7: note = 1-1_vlCDR2
YASQSWS

SEQ ID NO: 1523 - protein, 9 aa, synthetic construct
  source 1..9: note = 1-1_vlCDR3
QNGHSFPLT

SEQ ID NO: 1524 - protein, 120 aa, synthetic construct
  source 1..120: note = 1-2_vh
VHQVQLQQSGAEVKKPGASVKVSCKASGYTFTNYDINWVRQAPGQGLEWIGWIFPGDGSTQYNETFKGRATLTTDTSTSTAYMELSSLRSEDTAVYFCARQTTGTWFAYWGQGTLVTVSS

SEQ ID NO: 1525 - protein, 5 aa, synthetic construct
  source 1..5: note = 1-2_vhCDR1
NYDIN

SEQ ID NO: 1526 - protein, 17 aa, synthetic construct
  source 1..17: note = 1-2_vhCDR2
WIFPGDGSTQYNETFKG

SEQ ID NO: 1527 - protein, 9 aa, synthetic construct
  source 1..9: note = 1-2_vhCDR3
QTTGTWFAY

SEQ ID NO: 1528 - protein, 109 aa, synthetic construct
  source 1..109: note = 1-2_vl
VLDIVLTQSPATLSLSPGERATLSCRASQSISKYLHWYQQKPGQAPRLLIKYANQSIRGIPARFSGSGSGSDFTLTISSLEPEDFAVYYCQNGHSFPLTFGGGTKVEIK

SEQ ID NO: 1529 - protein, 11 aa, synthetic construct
  source 1..11: note = 1-2_vlCDR1
RASQSISKYLH

SEQ ID NO: 1530 - protein, 7 aa, synthetic construct
  source 1..7: note = 1-2_vlCDR2
YANQSIR

SEQ ID NO: 1531 - protein, 9 aa, synthetic construct
  source 1..9: note = 1-2_vlCDR3
QNGHSFPLT

SEQ ID NO: 1532 - protein, 120 aa, synthetic construct
  source 1..120: note = 1-4_vh
VHQVQLQQSGAEVKKPGASVKVSCKASGYTFTNYDINWVRQAPGQGLEWIGWIFPGDGSTQYNPKFKGRATLTTDTSTSTAYMELSSLRSEDTAVYFCARQTTGTWFAYWGQGTLVTVSS

SEQ ID NO: 1533 - protein, 5 aa, synthetic construct
  source 1..5: note = 1-4_vhCDR1
NYDIN

SEQ ID NO: 1534 - protein, 17 aa, synthetic construct
  source 1..17: note = 1-4_vhCDR2
WIFPGDGSTQYNPKFKG

SEQ ID NO: 1535 - protein, 9 aa, synthetic construct
  source 1..9: note = 1-4_vhCDR3
QTTGTWFAY

SEQ ID NO: 1536 - protein, 109 aa, synthetic construct
  source 1..109: note = 1-4_vl
VLDIVLTQSPATLSLSPGERATLSCRASQSISTYLHWYQQKPGQAPRLLIKEASQSISGIPARFSGSGSGSDFTLTISSLEPEDFAVYYCQNGHSFPLTFGGGTKVEIK

SEQ ID NO: 1537 - protein, 11 aa, synthetic construct
  source 1..11: note = 1-4_vlCDR1
RASQSISTYLH

SEQ ID NO: 1538 - protein, 7 aa, synthetic construct
  source 1..7: note = 1-4_vlCDR2
EASQSIS

SEQ ID NO: 1539 - protein, 9 aa, synthetic construct
  source 1..9: note = 1-4_vlCDR3
QNGHSFPLT

SEQ ID NO: 1540 - protein, 120 aa, synthetic construct
  source 1..120: note = 1-5_vh
VHQVQLQQSGAEVKKPGASVKVSCKASGYTFTNYDINWVRQAPGQGLEWIGWIFPGDGSTQYNEKFKGRATLTTDTSTSTAYMELSSLRSEDTAVYFCARQTTGTWFAYWGQGTLVTVSS

SEQ ID NO: 1541 - protein, 5 aa, synthetic construct
  source 1..5: note = 1-5_vhCDR1
NYDIN

SEQ ID NO: 1542 - protein, 17 aa, synthetic construct
  source 1..17: note = 1-5_vhCDR2
WIFPGDGSTQYNEKFKG

SEQ ID NO: 1543 - protein, 9 aa, synthetic construct
  source 1..9: note = 1-5_vhCDR3
QTTGTWFAY

SEQ ID NO: 1544 - protein, 109 aa, synthetic construct
  source 1..109: note = 1-5_vl
VLDIVLTQSPATLSLSPGERATLSCRASQSISHYLHWYQQKPGQAPRLLIKYASQSLSGIPARFSGSGSGSDFTLTISSLEPEDFAVYYCQNGHSFPLTFGGGTKVEIK

SEQ ID NO: 1545 - protein, 11 aa, synthetic construct
  source 1..11: note = 1-5_vlCDR1
RASQSISHYLH

SEQ ID NO: 1546 - protein, 7 aa, synthetic construct
  source 1..7: note = 1-5_vlCDR2
YASQSLS

SEQ ID NO: 1547 - protein, 9 aa, synthetic construct
  source 1..9: note = 1-5_vlCDR3
QNGHSFPLT

SEQ ID NO: 1548 - protein, 120 aa, synthetic construct
  source 1..120: note = 1-7_vh
VHQVQLQQSGAEVKKPGASVKVSCKASGYTYTNYDINWVRQAPGQGLEWIGWIFPGDGSTQYNEKFKGRATLTTDTSTSTAYMELSSLRSEDTAVYFCARQTTGTWFAYWGQGTLVTVSS

SEQ ID NO: 1549 - protein, 5 aa, synthetic construct
  source 1..5: note = 1-7_vhCDR1
NYDIN

SEQ ID NO: 1550 - protein, 17 aa, synthetic construct
  source 1..17: note = 1-7_vhCDR2
WIFPGDGSTQYNEKFKG

SEQ ID NO: 1551 - protein, 9 aa, synthetic construct
  source 1..9: note = 1-7_vhCDR3
QTTGTWFAY

SEQ ID NO: 1552 - protein, 109 aa, synthetic construct
  source 1..109: note = 1-7_vl
VLDIVLTQSPATLSLSPGERATLSCRASQSISPYLHWYQQKPGQAPRLLIKHASQSISGIPARFSGSGSGSDFTLTISSLEPEDFAVYYCQNGHSFPLTFGGGTKVEIK

SEQ ID NO: 1553 - protein, 11 aa, synthetic construct
  source 1..11: note = 1-7_vlCDR1
RASQSISPYLH

SEQ ID NO: 1554 - protein, 7 aa, synthetic construct
  source 1..7: note = 1-7_vlCDR2
HASQSIS

SEQ ID NO: 1555 - protein, 9 aa, synthetic construct
  source 1..9: note = 1-7_vlCDR3
QNGHSFPLT

SEQ ID NO: 1556 - protein, 120 aa, synthetic construct
  source 1..120: note = 2-5_vh
VHQVQLQQSGAEVKKPGASVKVSCKASGYTFTNYDINWVRQAPGQGLEWIGWIFPGDGSTQYNEKFKGRATLTTDTSTSTAYMELSSLRSEDTAVYFCARQTTSTWFAYWGQGTLVTVSS

SEQ ID NO: 1557 - protein, 5 aa, synthetic construct
  source 1..5: note = 2-5_vhCDR1
NYDIN

SEQ ID NO: 1558 - protein, 17 aa, synthetic construct
  source 1..17: note = 2-5_vhCDR2
WIFPGDGSTQYNEKFKG

SEQ ID NO: 1559 - protein, 9 aa, synthetic construct
  source 1..9: note = 2-5_vhCDR3
QTTSTWFAY

SEQ ID NO: 1560 - protein, 109 aa, synthetic construct
  source 1..109: note = 2-5_vl
VLDIVLTQSPATLSLSPGERATLSCRASQIISDYLHWYQQKPGQAPRLLIKYASQLISGIPARFSGSGSGSDFTLTISSLEPEDFAVYYCQNGHSFPLTFGGGTKVEIK

SEQ ID NO: 1561 - protein, 11 aa, synthetic construct
  source 1..11: note = 2-5_vlCDR1
RASQIISDYLH

SEQ ID NO: 1562 - protein, 7 aa, synthetic construct
  source 1..7: note = 2-5_vlCDR2
YASQLIS

SEQ ID NO: 1563 - protein, 9 aa, synthetic construct
  source 1..9: note = 2-5_vlCDR3
QNGHSFPLT

SEQ ID NO: 1564 - protein, 120 aa, synthetic construct; identical to SEQ ID NO: 1540
  source 1..120: note = 2-8_vh

SEQ ID NO: 1565 - protein, 5 aa, synthetic construct
  source 1..5: note = 2-8_vhCDR1
NYDIN

SEQ ID NO: 1566 - protein, 17 aa, synthetic construct
  source 1..17: note = 2-8_vhCDR2
WIFPGDGSTQYNEKFKG

SEQ ID NO: 1567 - protein, 9 aa, synthetic construct
  source 1..9: note = 2-8_vhCDR3
QTTGTWFAY

SEQ ID NO: 1568 - protein, 109 aa, synthetic construct
  source 1..109: note = 2-8_vl
VLDIVLTQSPATLSLSPGERATLSCRASQSISEYLHWYQQKPGQAPRLLIKHASQSISGIPARFSGSGSGSDFTLTISSLEPEDFAVYYCQNGHSFPLTFGGGTKVEIK

SEQ ID NO: 1569 - protein, 11 aa, synthetic construct
  source 1..11: note = 2-8_vlCDR1
RASQSISEYLH

SEQ ID NO: 1570 - protein, 7 aa, synthetic construct
  source 1..7: note = 2-8_vlCDR2
HASQSIS

SEQ ID NO: 1571 - protein, 9 aa, synthetic construct
  source 1..9: note = 2-8_vlCDR3
QNGHSFPLT

SEQ ID NO: 1572 - protein, 122 aa, synthetic construct
  source 1..122: note = chAb2_vh
VHQVQLQQPGAELVKPGASVKLSCKASGYTFTSYWMHWVKQRPGQGLEWIGMIHPDSGTTNYNEKFRSKATLTVDKSSSTAYMQLSSLTSEDSAVYYCAVYYGSTYWYFDVWGTGTTVTVSS

SEQ ID NO: 1573 - protein, 5 aa, synthetic construct
  source 1..5: note = chAb2_vhCDR1
SYWMH

SEQ ID NO: 1574 - protein, 17 aa, synthetic construct
  source 1..17: note = chAb2_vhCDR2
MIHPDSGTTNYNEKFRS

SEQ ID NO: 1575 - protein, 11 aa, synthetic construct
  source 1..11: note = chAb2_vhCDR3
YYGSTYWYFDV

SEQ ID NO: 1576 - protein, 114 aa, synthetic construct
  source 1..114: note = chAb2_vl
VLDVVMTQTPLSLPVSLGDQAYISCRSSQSLVHINGNTYLHWYRQKPGQSPKLLIYKVSNRFSGVPDRFSGSGSGTDFTLKISRVEAEDLGVYFCSQSTHFPFTFGSGTKLEIK

SEQ ID NO: 1577 - protein, 16 aa, synthetic construct
  source 1..16: note = chAb2_vlCDR1
RSSQSLVHINGNTYLH

SEQ ID NO: 1578 - protein, 7 aa, synthetic construct
  source 1..7: note = chAb2_vlCDR2
KVSNRFS

SEQ ID NO: 1579 - protein, 9 aa, synthetic construct
  source 1..9: note = chAb2_vlCDR3
SQSTHFPFT

SEQ ID NO: 1580 - protein, 119 aa, synthetic construct
  source 1..119: note = chAb3_vh
VHQVQLQQPGAELVKPGASVKLSCKASGYTFSSYWMHWVKQRPGQGLEWIGLIHPDSGSTNYNEMFKNKATLTVDRSSSTAYVQLSSLTSEDSAVYFCAGGGRLYFDYWGQGTTLTVSS

SEQ ID NO: 1581 - protein, 5 aa, synthetic construct
  source 1..5: note = chAb3_vhCDR1
SYWMH

SEQ ID NO: 1582 - protein, 17 aa, synthetic construct
  source 1..17: note = chAb3_vhCDR2
LIHPDSGSTNYNEMFKN

SEQ ID NO: 1583 - protein, 8 aa, synthetic construct
  source 1..8: note = chAb3_vhCDR3
GGRLYFDY

SEQ ID NO: 1584 - protein, 114 aa, synthetic construct
  source 1..114: note = chAb3_vl
VLDVVMTQTPLSLPVSLGDQASISCRSSQSLVHSNGDTYLRWYLQKPGQSPKLLIYKVSNRFSGVPDRFSGSGSGTDFTLKITRVEAEDLGVYFCSQSTHVPYTFGGGTKLEIK

SEQ ID NO: 1585 - protein, 16 aa, synthetic construct
  source 1..16: note = chAb3_vlCDR1
RSSQSLVHSNGDTYLR

SEQ ID NO: 1586 - protein, 7 aa, synthetic construct
  source 1..7: note = chAb3_vlCDR2
KVSNRFS

SEQ ID NO: 1587 - protein, 9 aa, synthetic construct
  source 1..9: note = chAb3_vlCDR3
SQSTHVPYT

SEQ ID NO: 1588 - protein, 119 aa, synthetic construct
  source 1..119: note = chAb4_vh
VHQVQLQQPGAELVKPGASVKLSCKASGYSFTSYWMHWVKQRPGQGLEWIGMIHPNSGSNNYNEKFKSKATLTVDKSSNTAYMQLSSLTSEDSAVYYCARRLGLHFDYWGQGTTLTVSS

SEQ ID NO: 1589 - protein, 5 aa, synthetic construct
  source 1..5: note = chAb4_vhCDR1
SYWMH

SEQ ID NO: 1590 - protein, 17 aa, synthetic construct
  source 1..17: note = chAb4_vhCDR2
MIHPNSGSNNYNEKFKS

SEQ ID NO: 1591 - protein, 8 aa, synthetic construct
  source 1..8: note = chAb4_vhCDR3
RLGLHFDY

SEQ ID NO: 1592 - protein, 107 aa, synthetic construct
  source 1..107: note = chAb4_vl
DIVMTQSQKFMSTPVGDRVSITCKASQNVGTAVAWYQQKPGQSPKLLIYSASNRYTGVPDRFTGSGSGTDFTLTISNMQSEDLADYFCQQYSSYPYTFGGGTKLEIK

SEQ ID NO: 1593 - protein, 11 aa, synthetic construct
  source 1..11: note = chAb4_vlCDR1
KASQNVGTAVA

SEQ ID NO: 1594 - protein, 7 aa, synthetic construct
  source 1..7: note = chAb4_vlCDR2
SASNRYT

SEQ ID NO: 1595 - protein, 9 aa, synthetic construct
  source 1..9: note = chAb4_vlCDR3
QQYSSYPYT

SEQ ID NO: 1596 - protein, 121 aa, synthetic construct
  source 1..121: note = chAb18_vh
QVQLQQSAAELARPGASVKMSCKASGYSFTSYTIHWVKQRPGQGLEWIGYINPNSRNTDYNQKFKDETTLTADRSSSTAYMQLISLTSEDSAVYYCARYSGSTPYWYFDVWGAGTTVTVSS

SEQ ID NO: 1597 - protein, 5 aa, synthetic construct
  source 1..5: note = chAb18_vhCDR1
SYTIH

SEQ ID NO: 1598 - protein, 17 aa, synthetic construct
  source 1..17: note = chAb18_vhCDR2
YINPNSRNTDYNQKFKD

SEQ ID NO: 1599 - protein, 12 aa, synthetic construct
  source 1..12: note = chAb18_vhCDR3
YSGSTPYWYFDV

SEQ ID NO: 1600 - protein, 106 aa, synthetic construct
  source 1..106: note = chAb18_vl
QIVLTQSPAILSASPGEKVTMTCRASSSVSYMNWYQQKPGSSPKPWIYATSNLASGVPARFSVSVSGTSHSLTISRVEAEDAATYYCQQWSSNPLTFGAGTKLELK

SEQ ID NO: 1601 - protein, 10 aa, synthetic construct
  source 1..10: note = chAb18_vlCDR1
RASSSVSYMN

SEQ ID NO: 1602 - protein, 7 aa, synthetic construct
  source 1..7: note = chAb18_vlCDR2
ATSNLAS

SEQ ID NO: 1603 - protein, 9 aa, synthetic construct
  source 1..9: note = chAb18_vlCDR3
QQWSSNPLT

SEQ ID NO: 1604 - protein, 116 aa, synthetic construct
  source 1..116: note = chAb13_vh
DVQLQESGPDLVKPSQSLSLTCTVTGYSITSGYSWHWIRQFPGNKLEWMGYIHSSGSTNYNPSLKSRISINRDTSKNQFFLQLNSVTTEDTATYYCAGYDDYFEYWGQGTTLTVSS

SEQ ID NO: 1605 - protein, 6 aa, synthetic construct
  source 1..6: note = chAb13_vhCDR1
SGYSWH

SEQ ID NO: 1606 - protein, 16 aa, synthetic construct
  source 1..16: note = chAb13_vhCDR2
YIHSSGSTNYNPSLKS

SEQ ID NO: 1607 - protein, 7 aa, synthetic construct
  source 1..7: note = chAb13_vhCDR3
YDDYFEY

SEQ ID NO: 1608 - protein, 107 aa, synthetic construct
  source 1..107: note = chAb13_vl
DIVMTQSQKFMSTSVGDRVSVTCKASQNVGFNVAWYQQKPGQSPKALIYSASYRYSGVPDRFTGSGSGTDFTLTISNVQSEDLAEYFCQQYNSYPFTFGSGTKLEIK

SEQ ID NO: 1609 - protein, 11 aa, synthetic construct
  source 1..11: note = chAb13_vlCDR1
KASQNVGFNVA

SEQ ID NO: 1610 - protein, 7 aa, synthetic construct
  source 1..7: note = chAb13_vlCDR2
SASYRYS

SEQ ID NO: 1611 - protein, 9 aa, synthetic construct
  source 1..9: note = chAb13_vlCDR3
QQYNSYPFT

SEQ ID NO: 1612 - protein, 118 aa, synthetic construct
  source 1..118: note = chAb12_vh
EVQLVESGGGLVKPGGSLKLSCAASGFTFSSYAMSWVRQTPEKRLEWVATISSGTNYTYYPDSVKGRFTISRDNAKNTLYLQMTSLRSEDTAMYYCARQGRYSWIAYWGQGTLVTVSA

SEQ ID NO: 1613 - protein, 5 aa, synthetic construct
  source 1..5: note = chAb12_vhCDR1
SYAMS

SEQ ID NO: 1614 - protein, 17 aa, synthetic construct
  source 1..17: note = chAb12_vhCDR2
TISSGTNYTYYPDSVKG

SEQ ID NO: 1615 - protein, 9 aa, synthetic construct
  source 1..9: note = chAb12_vhCDR3
QGRYSWIAY

SEQ ID NO: 1616 - protein, 110 aa, synthetic construct
  source 1..110: note = chAb12_vl
DIVLTQSPASLAVSLGQRATISCRASKSVSTSDYSYMHWNQQKPGQPPKLLIYLASNLESGVPARFSGSGSGTDFTLNIHPVEEEDAATYYCQHSRELLTFGAGTKLELK

SEQ ID NO: 1617 - protein, 15 aa, synthetic construct
  source 1..15: note = chAb12_vlCDR1
RASKSVSTSDYSYMH

SEQ ID NO: 1618 - protein, 7 aa, synthetic construct
  source 1..7: note = chAb12_vlCDR2
LASNLES

SEQ ID NO: 1619 - protein, 8 aa, synthetic construct
  source 1..8: note = chAb12_vlCDR3
QHSRELLT

SEQ ID NO: 1620 - protein, 118 aa, synthetic construct
  source 1..118: note = chAb14_vh
EVKLVESGGGLVKPGGSLKLSCAASGFTFSSYGMSWVRQTPEKRLEWVATISGGGTNTYYPDSVEGRFTISRDNAKNFLYLQMSSLRSEDTALYYCARHYGSQTMDYWGQGTSVTVSS

SEQ ID NO: 1621 - protein, 5 aa, synthetic construct
  source 1..5: note = chAb14_vhCDR1
SYGMS

SEQ ID NO: 1622 - protein, 17 aa, synthetic construct
  source 1..17: note = chAb14_vhCDR2
TISGGGTNTYYPDSVEG

SEQ ID NO: 1623 - protein, 9 aa, synthetic construct
  source 1..9: note = chAb14_vhCDR3
HYGSQTMDY

SEQ ID NO: 1624 - protein, 107 aa, synthetic construct
  source 1..107: note = chAb14_vl
DIQMTQSPASLSASVGETVTITCRTSGNIHNYLTWYQQKQGKSPQLLVYNAKTLADGVPSRFSGSGSGTQFSLKINSLQPEDFGSYYCQHFWSIMWTFGGGTKLEIK

SEQ ID NO: 1625 - protein, 11 aa, synthetic construct
  source 1..11: note = chAb14_vlCDR1
RTSGNIHNYLT

SEQ ID NO: 1626 - protein, 7 aa, synthetic construct
  source 1..7: note = chAb14_vlCDR2
NAKTLAD

SEQ ID NO: 1627 - protein, 9 aa, synthetic construct
  source 1..9: note = chAb14_vlCDR3
QHFWSIMWT

SEQ ID NO: 1628 - protein, 121 aa, synthetic construct
  source 1..121: note = chAb6_vh
QVQLQQSGAELMKPGASVKISCKATGYTFSRYWIEWVKQRPGHGLEWIGEILPGSGSTNYNEKFKGKATFTADTSSNTAYMQVSSLTSEDSAVHYCARRGYGYVPYALDYWGQGTSVTVSS

SEQ ID NO: 1629 - protein, 5 aa, synthetic construct
  source 1..5: note = chAb6_vhCDR1
RYWIE

SEQ ID NO: 1630 - protein, 17 aa, synthetic construct
  source 1..17: note = chAb6_vhCDR2
EILPGSGSTNYNEKFKG

SEQ ID NO: 1631 - protein, 12 aa, synthetic construct
  source 1..12: note = chAb6_vhCDR3
RGYGYVPYALDY

SEQ ID NO: 1632 - protein, 107 aa, synthetic construct
  source 1..107: note = chAb6_vl
EIQMTQTTSSLSASLGDRVTISCRASQDISNSLNWYQQKPDGTVNLLIYYTSRLYSGVPSRFSGSGSGTDYSLTISNLEQEDIATYFCQQGNTLPYTFGGGTKLEIK

SEQ ID NO: 1633 - protein, 11 aa, synthetic construct
  source 1..11: note = chAb6_vlCDR1
RASQDISNSLN

SEQ ID NO: 1634 - protein, 7 aa, synthetic construct
  source 1..7: note = chAb6_vlCDR2
YTSRLYS

SEQ ID NO: 1635 - protein, 9 aa, synthetic construct
  source 1..9: note = chAb6_vlCDR3
QQGNTLPYT

SEQ ID NO: 1636 - protein, 120 aa, synthetic construct
  source 1..120: note = chAb11_vh
EVKLVESGGGLVQPGGSLRLSCATSGFTFTNYYMSWVRQPPGKALEWLGFIRNKANDYTTEYSASVKGRFTISRDNSQSILYLQMNTLRAEDSATYYCARESPGNPFAYWGQGTLVTVSA

SEQ ID NO: 1637 - protein, 5 aa, synthetic construct
  source 1..5: note = chAb11_vhCDR1
NYYMS

SEQ ID NO: 1638 - protein, 19 aa, synthetic construct
  source 1..19: note = chAb11_vhCDR2
FIRNKANDYTTEYSASVKG

SEQ ID NO: 1639 - protein, 9 aa, synthetic construct
  source 1..9: note = chAb11_vhCDR3
ESPGNPFAY

SEQ ID NO: 1640 - protein, 113 aa, synthetic construct
  source 1..113: note = chAb11_vl
DIVMTQSPSSLTVTAGEKVTMTCKSSQSLLNSGTQKNFLTWYQQKPGQPPKLLIYWASTRESGVPDRFTGSGSGTDFTLTISSVQAEDLAVYFCQNDYIYPLTFGAGTKLELK

SEQ ID NO: 1641 - protein, 17 aa, synthetic construct
  source 1..17: note = chAb11_vlCDR1
KSSQSLLNSGTQKNFLT

SEQ ID NO: 1642 - protein, 7 aa, synthetic construct
  source 1..7: note = chAb11_vlCDR2
WASTRES

SEQ ID NO: 1643 - protein, 9 aa, synthetic construct
  source 1..9: note = chAb11_vlCDR3
QNDYIYPLT

SEQ ID NO: 1644 - protein, 121 aa, synthetic construct
  source 1..121: note = chAb16_vh
EVKLLESGGGLVQPGGSLKLSCAASGFDFSRYWMSWVRQAPGKGLEWIGEINPDSSTINYTPSLKDKFIISRDNAKNTLYLQMSKVRSEDTALYYCARPGFGNYIYAMDYWGQGTSVTVSS

SEQ ID NO: 1645 - protein, 5 aa, synthetic construct
  source 1..5: note = chAb16_vhCDR1
RYWMS

SEQ ID NO: 1646 - protein, 17 aa, synthetic construct
  source 1..17: note = chAb16_vhCDR2
EINPDSSTINYTPSLKD

SEQ ID NO: 1647 - protein, 12 aa, synthetic construct
  source 1..12: note = chAb16_vhCDR3
PGFGNYIYAMDY

SEQ ID NO: 1648 - protein, 107 aa, synthetic construct
  source 1..107: note = chAb16_vl
DIQMTQTTSSLSASLGDRVTINCRASQDISNFLNWYQQKPDGTVKLLIYYTSRLYLGVPSRFSGSGSGTDYSLTISNLEQEDIATYFCQQGNTLPPTFGGGTKLEIK

SEQ ID NO: 1649 - protein, 11 aa, synthetic construct
  source 1..11: note = chAb16_vlCDR1
RASQDISNFLN

SEQ ID NO: 1650 - protein, 7 aa, synthetic construct
  source 1..7: note = chAb16_vlCDR2
YTSRLYL

SEQ ID NO: 1651 - protein, 9 aa, synthetic construct
  source 1..9: note = chAb16_vlCDR3
QQGNTLPPT

SEQ ID NO: 1652 - protein, 125 aa, synthetic construct
  source 1..125: note = chAb10_vh
DVQLQESGPGLVKPSQSLSLTCTVTGYSITSDYAWNWIRQFPGNRLEWMGHINYSGITNYNPSLKSRISITRDTSKNQFFLQLYSVTTEDTATYFCARRSLFYYYGSSLYAMDYWGQGTSVTVSS

SEQ ID NO: 1653 - protein, 6 aa, synthetic construct
  source 1..6: note = chAb10_vhCDR1
SDYAWN

SEQ ID NO: 1654 - protein, 16 aa, synthetic construct
  source 1..16: note = chAb10_vhCDR2
HINYSGITNYNPSLKS

SEQ ID NO: 1655 - protein, 16 aa, synthetic construct
  source 1..16: note = chAb10_vhCDR3
RSLFYYYGSSLYAMDY

SEQ ID NO: 1656 - protein, 112 aa, synthetic construct
  source 1..112: note = chAb10_vl
DVVMTQSPFSLPVSLGDQASISCRSSQSLVHSNGNTYLHWYLQKPGQSPKLLIYKVSNRFSGVPDRFSGSGSGTDFTLKISRVEAEDLGVYFCSQSTHVPWTFGGGTKLEIK

SEQ ID NO: 1657 - protein, 16 aa, synthetic construct
  source 1..16: note = chAb10_vlCDR1
RSSQSLVHSNGNTYLH

SEQ ID NO: 1658 - protein, 7 aa, synthetic construct
  source 1..7: note = chAb10_vlCDR2
KVSNRFS

SEQ ID NO: 1659 - protein, 9 aa, synthetic construct
  source 1..9: note = chAb10_vlCDR3
SQSTHVPWT

SEQ ID NO: 1660 - protein, 119 aa, synthetic construct
  source 1..119: note = chAb7_vh
EVQLVESGENLVKPGGSLKLSCAASGFSFRGYGMSWVRQTPDKRLEWVAAISTGGNYTYYPDSVQGRFTISRDNANNTLYLQMSSLKSEDTAMYYCARRGGNYAGFAYWGQGTLVTVSA

SEQ ID NO: 1661 - protein, 5 aa, synthetic construct
  source 1..5: note = chAb7_vhCDR1
GYGMS

SEQ ID NO: 1662 - protein, 17 aa, synthetic construct
  source 1..17: note = chAb7_vhCDR2
AISTGGNYTYYPDSVQG

SEQ ID NO: 1663 - protein, 10 aa, synthetic construct
  source 1..10: note = chAb7_vhCDR3
RGGNYAGFAY

SEQ ID NO: 1664 - protein, 107 aa, synthetic construct
  source 1..107: note = chAb7_vl
DIQMTQSPASLSVSVGETVTITCRPSENIYSNLAWYQQKQGKSPQLLVYAATNLADGVPSRFSGSGSGTQYSLKINSLQSEDFGTYYCQHFWGTPFTFGSGTKLEIK

SEQ ID NO: 1665 - protein, 11 aa, synthetic construct
  source 1..11: note = chAb7_vlCDR1
RPSENIYSNLA

SEQ ID NO: 1666 - protein, 7 aa, synthetic construct
  source 1..7: note = chAb7_vlCDR2
AATNLAD

SEQ ID NO: 1667 - protein, 9 aa, synthetic construct
  source 1..9: note = chAb7_vlCDR3
QHFWGTPFT

SEQ ID NO: 1668 - protein, 121 aa, synthetic construct
  source 1..121: note = chAb8_vh
EVKLVESGGGLVKPGGSLKLSCAASGFTFSSYGMSWVRQTPEKRLEWVATISGGGNYTYCPDSVKGRFTISRDNAKNNLYLQMSSLRSEDTALYYCTRQRGYDYHYAMDFWGQGTSVTVSS

SEQ ID NO: 1669 - protein, 5 aa, synthetic construct
  source 1..5: note = chAb8_vhCDR1
SYGMS

SEQ ID NO: 1670 - protein, 17 aa, synthetic construct
  source 1..17: note = chAb8_vhCDR2
TISGGGNYTYCPDSVKG

SEQ ID NO: 1671 - protein, 12 aa, synthetic construct
  source 1..12: note = chAb8_vhCDR3
QRGYDYHYAMDF

SEQ ID NO: 1672 - protein, 107 aa, synthetic construct
  source 1..107: note = chAb8_vl
DIQMTQSPASLSVSVGETVTITCRASENIYSNLAWHQQKQGKSPQLLVYAATNLADGVPSRFSGNGSDTQYSLKINSLQSEDFGSYFCQNFWGTSWTFGGGTKLEIK

SEQ ID NO: 1673 - protein, 11 aa, synthetic construct
  source 1..11: note = chAb8_vlCDR1
RASENIYSNLA

SEQ ID NO: 1674 - protein, 7 aa, synthetic construct
  source 1..7: note = chAb8_vlCDR2
AATNLAD

SEQ ID NO: 1675 - protein, 9 aa, synthetic construct
  source 1..9: note = chAb8_vlCDR3
QNFWGTSWT

SEQ ID NO: 1676 - protein, 117 aa, synthetic construct
  source 1..117: note = chAb17_vh
EVKLVESGGGLVQPGGSLKLSCAASGFTFSSYIMSWVRQTPEKRLEWVASIVSSNITYYPDSMKGRFTISRDNARNILYLQMSSLKSEDTAMYYCARSGTRAWFAYWGQGTLVTVSA

SEQ ID NO: 1677 - protein, 5 aa, synthetic construct
  source 1..5: note = chAb17_vhCDR1
SYIMS

SEQ ID NO: 1678 - protein, 16 aa, synthetic construct
  source 1..16: note = chAb17_vhCDR2
SIVSSNITYYPDSMKG

SEQ ID NO: 1679 - protein, 9 aa, synthetic construct
  source 1..9: note = chAb17_vhCDR3
SGTRAWFAY

SEQ ID NO: 1680 - protein, 111 aa, synthetic construct
  source 1..111: note = chAb17_vl
DIVLTQSPASLAVSLGQRATISCRASKSVSTSAYSYMHWYQQKPGQPPKLLIYLASNLESGVPARFSGSGSGTDFTLNIHPVEEEDAATYYCQHSRELPYTFGGGTKLEIK

SEQ ID NO: 1681 - protein, 15 aa, synthetic construct
  source 1..15: note = chAb17_vlCDR1
RASKSVSTSAYSYMH

SEQ ID NO: 1682 - protein, 7 aa, synthetic construct
  source 1..7: note = chAb17_vlCDR2
LASNLES

SEQ ID NO: 1683 - protein, 9 aa, synthetic construct
  source 1..9: note = chAb17_vlCDR3
QHSRELPYT

SEQ ID NO: 1684 - protein, 118 aa, synthetic construct
  source 1..118: note = chAb5_vh
QVQLQQPGDELVKPGASVKLSCKTSGYTFTTDWMHWVKQRPGQGLEWIGMIHPNSGTTNYNEKFKSKAALTVDKSSSTACMQLSSLTSEDSAVYYCARSYWKWYFDVWGTGTTVTVSS

SEQ ID NO: 1685 - protein, 5 aa, synthetic construct
  source 1..5: note = chAb5_vhCDR1
TDWMH

SEQ ID NO: 1686 - protein, 17 aa, synthetic construct
  source 1..17: note = chAb5_vhCDR2
MIHPNSGTTNYNEKFKS

SEQ ID NO: 1687 - protein, 9 aa, synthetic construct
  source 1..9: note = chAb5_vhCDR3
SYWKWYFDV

SEQ ID NO: 1688 - protein, 106 aa, synthetic construct
  source 1..106: note = chAb5_vl
QIVLTQSPAIMSASLGEEITLTCSASSSVSYMHWYQQKSGTSPKLLIYSTSNLASGVPSRFSGSGSGTFYSLTISSVEAEDSADYYCHQWTSYMYTFGGGTKLEIK

SEQ ID NO: 1689 - protein, 10 aa, synthetic construct
  source 1..10: note = chAb5_vlCDR1
SASSSVSYMH

SEQ ID NO: 1690 - protein, 7 aa, synthetic construct
  source 1..7: note = chAb5_vlCDR2
STSNLAS

SEQ ID NO: 1691 - protein, 9 aa, synthetic construct
  source 1..9: note = chAb5_vlCDR3
HQWTSYMYT

SEQ ID NO: 1692 - protein, 117 aa, synthetic construct
  source 1..117: note = huAb3v2.5_vh
EVQLVQSGAEVKKPGSSVKVSCKASGYTFSSYWMHWVRQAPGQGLEWIGLIHPESGSTNYNEMFKNRATLTVDRSTSTAYMELSSLRSEDTAVYYCAGGGRLYFDYWGQGTTVTVSS

SEQ ID NO: 1693 - protein, 5 aa, synthetic construct
  source 1..5: note = huAb3v2.5_vhCDR1
SYWMH

SEQ ID NO: 1694 - protein, 17 aa, synthetic construct
  source 1..17: note = huAb3v2.5_vhCDR2
LIHPESGSTNYNEMFKN

SEQ ID NO: 1695 - protein, 8 aa, synthetic construct
  source 1..8: note = huAb3v2.5_vhCDR3
GGRLYFDY

SEQ ID NO: 1696 - protein, 112 aa, synthetic construct
  source 1..112: note = huAb3v2.5_vl
DIVMTQSPLSLPVTPGEPASISCRSSQSLVHSNRDTYLRWYLQKPGQSPQLLIYKVSNRFSGVPDRFSGSGSGTDFTLKISRVEAEDVGVYYCSQSTHVPYTFGGGTKVEIK

SEQ ID NO: 1697 - protein, 16 aa, synthetic construct
  source 1..16: note = huAb3v2.5_vlCDR1
RSSQSLVHSNRDTYLR

SEQ ID NO: 1698 - protein, 7 aa, synthetic construct
  source 1..7: note = huAb3v2.5_vlCDR2
KVSNRFS

SEQ ID NO: 1699 - protein, 9 aa, synthetic construct
  source 1..9: note = huAb3v2.5_vlCDR3
SQSTHVPYT

SEQ ID NO: 1700 - protein, 117 aa, synthetic construct; identical to SEQ ID NO: 1692
  source 1..117: note = huAb3v2.6_vh

SEQ ID NO: 1701 - protein, 5 aa, synthetic construct
  source 1..5: note = huAb3v2.6_vhCDR1
SYWMH

SEQ ID NO: 1702 - protein, 17 aa, synthetic construct
  source 1..17: note = huAb3v2.6_vhCDR2
LIHPESGSTNYNEMFKN

SEQ ID NO: 1703 - protein, 8 aa, synthetic construct
  source 1..8: note = huAb3v2.6_vhCDR3
GGRLYFDY

SEQ ID NO: 1704 - protein, 112 aa, synthetic construct
  source 1..112: note = huAb3v2.6_vl
DIVMTQSPLSLPVTPGEPASISCRSSQSLVHSNQDTYLRWYLQKPGQSPQLLIYKVSNRFSGVPDRFSGSGSGTDFTLKISRVEAEDVGVYYCSQSTHVPYTFGGGTKVEIK

SEQ ID NO: 1705 - protein, 16 aa, synthetic construct
  source 1..16: note = huAb3v2.6_vlCDR1
RSSQSLVHSNQDTYLR

SEQ ID NO: 1706 - protein, 7 aa, synthetic construct
  source 1..7: note = huAb3v2.6_vlCDR2
KVSNRFS

SEQ ID NO: 1707 - protein, 9 aa, synthetic construct
  source 1..9: note = huAb3v2.6_vlCDR3
SQSTHVPYT

SEQ ID NO: 1708 - protein, 116 aa, synthetic construct
  source 1..116: note = huAb13v1_vh
EVQLQESGPGLVKPSETLSLTCAVTGYSITSGYSWHWIRQFPGNGLEWMGYIHSSGSTNYNPSLKSRISISRDTSKNQFFLKLSSVTAADTAVYYCAGYDDYFEYWGQGTTVTVSS

SEQ ID NO: 1709 - protein, 6 aa, synthetic construct
  source 1..6: note = huAb13v1_vhCDR1
SGYSWH

SEQ ID NO: 1710 - protein, 16 aa, synthetic construct
  source 1..16: note = huAb13v1_vhCDR2
YIHSSGSTNYNPSLKS

SEQ ID NO: 1711 - protein, 7 aa, synthetic construct
  source 1..7: note = huAb13v1_vhCDR3
YDDYFEY

SEQ ID NO: 1712 - protein, 107 aa, synthetic construct
  source 1..107: note = huAb13v1_vl
DIQMTQSPSSLSASVGDRVTITCKASQNVGFNVAWYQQKPGKSPKALIYSASYRYSGVPSRFSGSGSGTDFTLTISSLQPEDFAEYFCQQYNWYPFTFGQGTKLEIK

SEQ ID NO: 1713 - protein, 11 aa, synthetic construct
  source 1..11: note = huAb13v1_vlCDR1
KASQNVGFNVA

SEQ ID NO: 1714 - protein, 7 aa, synthetic construct
  source 1..7: note = huAb13v1_vlCDR2
SASYRYS

SEQ ID NO: 1715 - protein, 9 aa, synthetic construct
  source 1..9: note = huAb13v1_vlCDR3
QQYNWYPFT

SEQ ID NO: 1716 - protein, 119 aa, synthetic construct
  source 1..119: note = TPP-5706_vh
QVQLQQPGAELVKPGASVKMSCKASGYTFTIYNVHWIKQTPGQGLEWMGTIFPGNGDTSYNQKFKDKATLTTDKSSKTAYMQLNSLTSEDSAVYYCARWDDGNVGFAHWGQGTLVTVSA

SEQ ID NO: 1717 - protein, 5 aa, synthetic construct
  source 1..5: note = TPP-5706_vhCDR1
IYNVH

SEQ ID NO: 1718 - protein, 17 aa, synthetic construct
  source 1..17: note = TPP-5706_vhCDR2
TIFPGNGDTSYNQKFKD

SEQ ID NO: 1719 - protein, 10 aa, synthetic construct
  source 1..10: note = TPP-5706_vhCDR3
WDDGNVGFAH

SEQ ID NO: 1720 - protein, 107 aa, synthetic construct
  source 1..107: note = TPP-5706_vl
DIQMTQSPASLSASVGETVTITCRASENINNYLTWFQQKQGKSPQLLVYHAKTLAEGVPSRFSGSGSGTQFSLKINSLQPEDFGSYYCQHHYGTPPTFGGGTKLEIK

SEQ ID NO: 1721 - protein, 11 aa, synthetic construct
  source 1..11: note = TPP-5706_vlCDR1
RASENINNYLT

SEQ ID NO: 1722 - protein, 7 aa, synthetic construct
  source 1..7: note = TPP-5706_vlCDR2
HAKTLAE

SEQ ID NO: 1723 - protein, 9 aa, synthetic construct
  source 1..9: note = TPP-5706_vlCDR3
QHHYGTPPT

SEQ ID NO: 1724 - protein, 119 aa, synthetic construct
  source 1..119: note = TPP-6642_vh
EVQLVQSGAEVKKPGASVKVSCKASGYTFTIYNVHWVRQAPGQGLEWMGTIFPGNGDTSYNQKFKDKVTMTTDTSTSTAYMELSSLRSEDTAVYYCARWDDGNVGFAHWGQGTLVTVSS

SEQ ID NO: 1725 - protein, 5 aa, synthetic construct
  source 1..5: note = TPP-6642_vhCDR1
IYNVH

SEQ ID NO: 1726 - protein, 17 aa, synthetic construct
  source 1..17: note = TPP-6642_vhCDR2
TIFPGNGDTSYNQKFKD

SEQ ID NO: 1727 - protein, 10 aa, synthetic construct
  source 1..10: note = TPP-6642_vhCDR3
WDDGNVGFAH

SEQ ID NO: 1728 - protein, 107 aa, synthetic construct
  source 1..107: note = TPP-6642_vl
DIQMTQSPSSLSASVGDRVTITCRASENINNYLTWFQQKQGKSPQLLIYHAKTLAEGVPSRFSGSGSGTDFTLTISSLQPEDFATYYCQHHYGTPPTFGGGTKVEIK

SEQ ID NO: 1729 - protein, 11 aa, synthetic construct
  source 1..11: note = TPP-6642_vlCDR1
RASENINNYLT

SEQ ID NO: 1730 - protein, 7 aa, synthetic construct
  source 1..7: note = TPP-6642_vlCDR2
HAKTLAE

SEQ ID NO: 1731 - protein, 9 aa, synthetic construct
  source 1..9: note = TPP-6642_vlCDR3
QHHYGTPPT

SEQ ID NO: 1732 - protein, 119 aa, synthetic construct
  source 1..119: note = TPP-6850_vh
EVQLVQSGAEVKKPGASVKVSCKASGYTFTIYNVHWIRQAPGQGLEWMGTIFPGNGDTSYNQKFKDRATLTTDKSTKTAYMELRSLRSDDTAVYYCARWDDGNVGFAHWGQGTLVTVSS

SEQ ID NO: 1733 - protein, 5 aa, synthetic construct
  source 1..5: note = TPP-6850_vhCDR1
IYNVH

SEQ ID NO: 1734 - protein, 17 aa, synthetic construct
  source 1..17: note = TPP-6850_vhCDR2
TIFPGNGDTSYNQKFKD

SEQ ID NO: 1735 - protein, 10 aa, synthetic construct
  source 1..10: note = TPP-6850_vhCDR3
WDDGNVGFAH

SEQ ID NO: 1736 - protein, 107 aa, synthetic construct
  source 1..107: note = TPP-6850_vl
DIQMTQSPSSLSASVGDRVTITCRASENINNYLTWFQQKPGKAPKLLVYHAKTLAEGVPSRFSGSGSGTQFTLTISSLQPEDFATYYCQHHYGTPPTFGQGTKLEIK

SEQ ID NO: 1737 - protein, 11 aa, synthetic construct
  source 1..11: note = TPP-6850_vlCDR1
RASENINNYLT

SEQ ID NO: 1738 - protein, 7 aa, synthetic construct
  source 1..7: note = TPP-6850_vlCDR2
HAKTLAE

SEQ ID NO: 1739 - protein, 9 aa, synthetic construct
  source 1..9: note = TPP-6850_vlCDR3
QHHYGTPPT

SEQ ID NO: 1740 - protein, 118 aa, synthetic construct
  source 1..118: note = TPP-3803_vh
QVKLQQSGAELVKPGASVKLSCKASGYTFTNYDINWVRQRPEQGLEWIGWIFPGDGSTQYNEKFKGKATLTTDTSSSTAYMQLSRLTSEDSAVYFCARQTTATWFAYWGQGTTVTVSS

SEQ ID NO: 1741 - protein, 5 aa, synthetic construct
  source 1..5: note = TPP-3803_vhCDR1
NYDIN

SEQ ID NO: 1742 - protein, 17 aa, synthetic construct
  source 1..17: note = TPP-3803_vhCDR2
WIFPGDGSTQYNEKFKG

SEQ ID NO: 1743 - protein, 9 aa, synthetic construct
  source 1..9: note = TPP-3803_vhCDR3
QTTATWFAY

SEQ ID NO: 1744 - protein, 107 aa, synthetic construct
  source 1..107: note = TPP-3803_vl
DIELTQSPTTLSVTPGDRVSLSCRASQSISDYLHWYQQKSHESPRLLIKYASQSISGIPSRFSGSGSGSDFTLSINSVEPEDVGVYYCQNGHSFPLTFGAGTKLELK

SEQ ID NO: 1745 - protein, 11 aa, synthetic construct
  source 1..11: note = TPP-3803_vlCDR1
RASQSISDYLH

SEQ ID NO: 1746 - protein, 7 aa, synthetic construct
  source 1..7: note = TPP-3803_vlCDR2
YASQSIS

SEQ ID NO: 1747 - protein, 9 aa, synthetic construct
  source 1..9: note = TPP-3803_vlCDR3
QNGHSFPLT

SEQ ID NO: 1748 - protein, 115 aa, synthetic construct
  source 1..115: note = TRL4542_vh
QVQLVESGGDLVQPGESLRLSCAASGFIFSDAWMVWVRQAPGKGLEWVGRIKTNGDGGTTDLTEPVKGRFTISRDDSKNMVYLQMNNLRTEDTAIYYCTTAPGFWGQGTLVTVSS

SEQ ID NO: 1749 - protein, 5 aa, synthetic construct
  source 1..5: note = TRL4542_vhCDR1
DAWMV

SEQ ID NO: 1750 - protein, 19 aa, synthetic construct
  source 1..19: note = TRL4542_vhCDR2
RIKTNGDGGTTDLTEPVKG

SEQ ID NO: 1751 - protein, 4 aa, synthetic construct
  source 1..4: note = TRL4542_vhCDR3
APGF

SEQ ID NO: 1752 - protein, 113 aa, synthetic construct
  source 1..113: note = TRL4542_vl
DIEMTQSPDSLAVSLGERATINCKSSHNLLYKSNNKNYLAWSQQKPGQPPRLLIYWASTRDSGVPDRFSGSGSGTDFTLTISSLQAEDVAVYYCHQYYGTKWTFGQGTRVEIK

SEQ ID NO: 1753 - protein, 17 aa, synthetic construct
  source 1..17: note = TRL4542_vlCDR1
KSSHNLLYKSNNKNYLA

SEQ ID NO: 1754 - protein, 7 aa, synthetic construct
  source 1..7: note = TRL4542_vlCDR2
WASTRDS

SEQ ID NO: 1755 - protein, 9 aa, synthetic construct
  source 1..9: note = TRL4542_vlCDR3
HQYYGTKWT

SEQ ID NO: 1756 - protein, 119 aa, synthetic construct
  source 1..119: note = h1702_vh
QVQLVQSGGGVVQPGTSLRLSCAASGFIFSSSAMHWVRQAPGKGLEWVAVISYDGSNKYYVDSVKGRFTISRDNSKNTLYLQMNSLRAEDTAVYYCARSARLYASFDYWGQGALVTVSS

SEQ ID NO: 1757 - protein, 5 aa, synthetic construct
  source 1..5: note = h1702_vhCDR1
SSAMH

SEQ ID NO: 1758 - protein, 17 aa, synthetic construct
  source 1..17: note = h1702_vhCDR2
VISYDGSNKYYVDSVKG

SEQ ID NO: 1759 - protein, 10 aa, synthetic construct
  source 1..10: note = h1702_vhCDR3
SARLYASFDY

SEQ ID NO: 1760 - protein, 110 aa, synthetic construct
  source 1..110: note = h1702_vl
QTVVTQEPSFSVSPGGTVTLTCGLSSGSVSTSHYPSWYQQTPGQAPRMLIYNTNTRSSGVPDRFSGSILGNKAALTITGAQADDESDYYCAIHVDRDIWVFGGGTKLTVL

SEQ ID NO: 1761 - protein, 14 aa, synthetic construct
  source 1..14: note = h1702_vlCDR1
GLSSGSVSTSHYPS

SEQ ID NO: 1762 - protein, 7 aa, synthetic construct
  source 1..7: note = h1702_vlCDR2
NTNTRSS

SEQ ID NO: 1763 - protein, 10 aa, synthetic construct
  source 1..10: note = h1702_vlCDR3
AIHVDRDIWV

SEQ ID NO: 1764 - protein, 119 aa, synthetic construct
  source 1..119: note = h1703_vh
QVQLQESGGGLVQPGGSLRLSCAASGFTFSSYAMSWVRQAPGKGLEWVSAISGSGGSTYYADSVKGRYTISRDNSKNTLYLQMNSLRAEDTAVYYCAKGVGPVHALDVWGQGTTVTVSS

SEQ ID NO: 1765 - protein, 5 aa, synthetic construct
  source 1..5: note = h1703_vhCDR1
SYAMS

SEQ ID NO: 1766 - protein, 17 aa, synthetic construct
  source 1..17: note = h1703_vhCDR2
AISGSGGSTYYADSVKG

SEQ ID NO: 1767 - protein, 10 aa, synthetic construct
  source 1..10: note = h1703_vhCDR3
GVGPVHALDV

SEQ ID NO: 1768 - protein, 108 aa, synthetic construct
  source 1..108: note = h1703_vl
DIRLTQSPSSLSASVGDRVTITCRASQSISTYLNWYQQKPGKAPILLINAVSGLQSGVPSRFSGSGSGTHFTLTITSLQPEDFATYYCQQSYSTPMWTFGQGTKVEIK

SEQ ID NO: 1769 - protein, 11 aa, synthetic construct
  source 1..11: note = h1703_vlCDR1
RASQSISTYLN

SEQ ID NO: 1770 - protein, 7 aa, synthetic construct
  source 1..7: note = h1703_vlCDR2
AVSGLQS

SEQ ID NO: 1771 - protein, 10 aa, synthetic construct
  source 1..10: note = h1703_vlCDR3
QQSYSTPMWT

SEQ ID NO: 1772 - protein, 118 aa, synthetic construct
  source 1..118: note = huA3_vh
EVQLVESGGGLVKPGGSLRLSCAASGFTFSRYGMSWVRQAPGKGLEWVSAISSGGGSIYYPDTVKGRLTISRDNAKNTLYLQMNSLRAEDTAVYYCTRHYLLFEMDYWGQGTTVTVSS

SEQ ID NO: 1773 - protein, 5 aa, synthetic construct
  source 1..5: note = huA3_vhCDR1
RYGMS

SEQ ID NO: 1774 - protein, 17 aa, synthetic construct
  source 1..17: note = huA3_vhCDR2
AISSGGGSIYYPDTVKG

SEQ ID NO: 1775 - protein, 9 aa, synthetic construct
  source 1..9: note = huA3_vhCDR3
HYLLFEMDY

SEQ ID NO: 1776 - protein, 106 aa, synthetic construct
  source 1..106: note = huA3_vl
DIVLTQSPSFLSASVGDRVTITCKASQNVNTAVAWYQQKPGKAPKLLIFSASNRYTGVPSRFSGSGSGTDFTLTISSLQPEDVAAYFCQQYSSSLTFGGGTKLEIK

SEQ ID NO: 1777 - protein, 11 aa, synthetic construct
  source 1..11: note = huA3_vlCDR1
KASQNVNTAVA

SEQ ID NO: 1778 - protein, 7 aa, synthetic construct
  source 1..7: note = huA3_vlCDR2
SASNRYT

SEQ ID NO: 1779 - protein, 8 aa, synthetic construct
  source 1..8: note = huA3_vlCDR3
QQYSSSLT

SEQ ID NO: 1780 - protein, 124 aa, synthetic construct
  source 1..124: note = huA9_vh
QVQLVQSGAEVKKPGASVKVSCKASGYTFTDYAMHWVKQAPGQGLEWMGVISTYYGNTNYNQKFKGRVTMTVDKSISTAYMELSRLRSDDTAVYYCARPVTTMVPRGGYYFDYWGQGTTVTVSS

SEQ ID NO: 1781 - protein, 5 aa, synthetic construct
  source 1..5: note = huA9_vhCDR1
DYAMH

SEQ ID NO: 1782 - protein, 17 aa, synthetic construct
  source 1..17: note = huA9_vhCDR2
VISTYYGNTNYNQKFKG

SEQ ID NO: 1783 - protein, 15 aa, synthetic construct
  source 1..15: note = huA9_vhCDR3
PVTTMVPRGGYYFDY

SEQ ID NO: 1784 - protein, 107 aa, synthetic construct
  source 1..107: note = huA9_vl
DIQLTQSPSFLSASVGDRVTITCRASKSINKYLAWYQQKPGKAPKLLIYSGSTLQSGVPSRFSGSGSGTEFTLTISSLQPEDFATYYCQQHNEYPLTFGQGTKLEIK

SEQ ID NO: 1785 - protein, 11 aa, synthetic construct
  source 1..11: note = huA9_vlCDR1
RASKSINKYLA

SEQ ID NO: 1786 - protein, 7 aa, synthetic construct
  source 1..7: note = huA9_vlCDR2
SGSTLQS

SEQ ID NO: 1787 - protein, 9 aa, synthetic construct
  source 1..9: note = huA9_vlCDR3
QQHNEYPLT

SEQ ID NO: 1788 - protein, 118 aa, synthetic construct
  source 1..118: note = m1704_vh
EVQLVESGGGLVKSGGSLKLSCAASGFTFSRYGMSWVRQTPEKRLEWVAAISSNGGSIYYPDTVKGRLTISRDNAKNTLYLQMISLRSEDTALYFCTRHYLLFEMDYWGRGTSVTVSS

SEQ ID NO: 1789 - protein, 5 aa, synthetic construct
  source 1..5: note = m1704_vhCDR1
RYGMS

SEQ ID NO: 1790 - protein, 17 aa, synthetic construct
  source 1..17: note = m1704_vhCDR2
AISSNGGSIYYPDTVKG

SEQ ID NO: 1791 - protein, 9 aa, synthetic construct
  source 1..9: note = m1704_vhCDR3
HYLLFEMDY

SEQ ID NO: 1792 - protein, 106 aa, synthetic construct
  source 1..106: note = m1704_vl
DIVMTQSQEFMSTTVGDRVYITCKASQNVNTAVAWYQQKPGQSPKLLIFSASNRYTGVPDRFTGSGSGTDFTLTISNVQSEDLAAYFCQQYSSSLTFGAGTKLELK

SEQ ID NO: 1793 - protein, 11 aa, synthetic construct
  source 1..11: note = m1704_vlCDR1
KASQNVNTAVA

SEQ ID NO: 1794 - protein, 7 aa, synthetic construct
  source 1..7: note = m1704_vlCDR2
SASNRYT

SEQ ID NO: 1795 - protein, 8 aa, synthetic construct
  source 1..8: note = m1704_vlCDR3
QQYSSSLT

SEQ ID NO: 1796 - protein, 446 aa, synthetic construct
  source 1..446: note = mirzotamab_heavy_chain
EVQLQESGPGLVKPSETLSLTCAVTGYSITSGYSWHWIRQFPGNGLEWMGYIHSSGSTNYNPSLKSRISISRDTSKNQFFLKLSSVTAADTAVYYCAGYDDYFEYWGQGTTVTVSSASTKGPSVFPLAPSSKSTSGGTAALGCLVKDYFPEPVTVSWNSGALTSGVHTFPAVLQSSGLYSLSSVVTVPSSSLGTQTYICNVNHKPSNTKVDKKVEPKSCDKTHTCPPCPAPEAAGGPSVFLFPPKPKDTLMISRTPEVTCVVVDVSHEDPEVKFNWYVDGVEVHNAKTKPREEQYNSTYRVVSVLTVLHQDWLNGKEYKCKVSNKALPAPIEKTISKAKGQPREPQVYTLPPSREEMTKNQVSLTCLVKGFYPSDIAVEWESNGQPENNYKTTPPVLDSDGSFFLYSKLTVDKSRWQQGNVFSCSVMHEALHNHYTQKSLSLSPGK

SEQ ID NO: 1797 - protein, 214 aa, synthetic construct
  source 1..214: note = mirzotamab_light_chain
DIQMTQSPSSLSASVGDRVTITCKASQNVGFNVAWYQQKPGKSPKALIYSASYRYSGVPSRFSGSGSGTDFTLTISSLQPEDFAEYFCQQYNWYPFTFGQGTKLEIKRTVAAPSVFIFPPSDEQLKSGTASVVCLLNNFYPREAKVQWKVDNALQSGNSQESVTEQDSKDSTYSLSSTLTLSKADYEKHKVYACEVTHQGLSSPVTKSFNRGEC

SEQ ID NO: 1798 - protein, 217 aa, synthetic construct
  source 1..217: note = Heterodimeric Fc Backbone 1 monomer 1 (-)
APELLGGPSVFLFPPKPKDTLMISRTPEVTCVVVDVSHEDPEVKFNWYVDGVEVHNAKTKPREEEYNSTYRVVSVLTVLHQDWLNGKEYKCKVSNKALPAPIEKTISKAKGQPREPQVYTLPPSREEMTKNQVSLTCDVSGFYPSDIAVEWESDGQPENNYKTTPPVLDSDGSFFLYSKLTVDKSRWEQGDVFSCSVMHEALHNHYTQKSLSLSPGK

SEQ ID NO: 1799 - protein, 217 aa, synthetic construct
  source 1..217: note = Heterodimeric Fc Backbone 1 monomer 2 (+)
APELLGGPSVFLFPPKPKDTLMISRTPEVTCVVVDVSHEDPEVKFNWYVDGVEVHNAKTKPREEQYNSTYRVVSVLTVLHQDWLNGKEYKCKVSNKALPAPIEKTISKAKGQPREPQVYTLPPSREQMTKNQVKLTCLVKGFYPSDIAVEWESNGQPENNYKTTPPVLDSDGSFFLYSKLTVDKSRWQQGNVFSCSVMHEALHNHYTQKSLSLSPGK

SEQ ID NO: 1800 - protein, 217 aa, synthetic construct; identical to SEQ ID NO: 1798
  source 1..217: note = Heterodimeric Fc Backbone 2 monomer 1 (-)

SEQ ID NO: 1801 - protein, 217 aa, synthetic construct
  source 1..217: note = Heterodimeric Fc Backbone monomer 2 (+)
APELLGGPSVFLFPPKPKDTLMISRTPEVTCVVVDVSHEDPEVKFNWYVDGVEVHNAKTKPREEQYNSTYRVVSVLTVLHQDWLNGKEYKCKVSNKALPAPIEKTISKAKGQPREPQVYTLPPSREEMTKNQVKLTCLVKGFYPSDIAVEWESNGQPENNYKTTPPVLDSDGSFFLYSKLTVDKSRWQQGNVFSCSVMHEALHNHYTQKSLSLSPGK

SEQ ID NO: 1802 - protein, 217 aa, synthetic construct
  source 1..217: note = Heterodimeric Fc Backbone 3 monomer 1 (-)
APELLGGPSVFLFPPKPKDTLMISRTPEVTCVVVDVSHEDPEVKFNWYVDGVEVHNAKTKPREEEYNSTYRVVSVLTVLHQDWLNGKEYKCKVSNKALPAPIEKTISKAKGQPREPQVYTLPPSREEMTKNQVSLTCEVSGFYPSDIAVEWESDGQPENNYKTTPPVLDSDGSFFLYSKLTVDKSRWEQGDVFSCSVMHEALHNHYTQKSLSLSPGK

SEQ ID NO: 1803 - protein, 217 aa, synthetic construct; identical to SEQ ID NO: 1801
  source 1..217: note = Heterodimeric Fc Backbone 3 monomer 2 (+)

SEQ ID NO: 1804 - protein, 217 aa, synthetic construct
  source 1..217: note = Heterodimeric Fc Backbone 4 monomer 1 (-)
APELLGGPSVFLFPPKPKDTLMISRTPEVTCVVVDVSHEDPEVKFNWYVDGVEVHNAKTKPREEEYNSTYRVVSVLTVLHQDWLNGKEYKCKVSNKALPAPIEKTISKAKGQPREPQVYTLPPSREEMTENEVSLTCLVKGFYPSDIAVEWESDGQPENNYKTTPPVLDSDGSFFLYSKLEVDKSRWEQGDVFSCSVMHEALHNHYTQKSLSLSPGK

SEQ ID NO: 1805 - protein, 217 aa, synthetic construct
  source 1..217: note = Heterodimeric Fc Backbone 4 monomer 2 (+)
APELLGGPSVFLFPPKPKDTLMISRTPEVTCVVVDVSHEDPEVKFNWYVDGVEVHNAKTKPREEQYNSTYRVVSVLTVLHQDWLNGKEYKCKVSNKALPAPIEKTISKAKGQPREPQVYTLPPSREEMTKNQVSLTCLVKGFYPSDIAVEWESNGQPENNYKTTPPVLDSKGSFFLYSKLTVDKSRWQQGNVFSCSVMHEALHNHYTQKSLSLSPGK

SEQ ID NO: 1806 - protein, 217 aa, synthetic construct
  source 1..217: note = Heterodimeric Fc Backbone 5 monomer 1 (-)
APELLGGPSVFLFPPKPKDTLMISRTPEVTCVVVDVSHEDPEVKFNWYVDGVEVHNAKTKPREEEYNSTYRVVSVLTVLHQDWLNGKEYKCKVSNKALPAPIEKTISKAKGQPREPQVYTLPPSRDELTKNQVSLTCDVSGFYPSDIAVEWESDGQPENNYKTTPPVLDSDGSFFLYSKLTVDKSRWEQGDVFSCSVMHEALHNHYTQKSLSLSPGK

SEQ ID NO: 1807 - protein, 217 aa, synthetic construct
  source 1..217: note = Heterodimeric Fc Backbone 5 monomer 2 (+)
APELLGGPSVFLFPPKPKDTLMISRTPEVTCVVVDVSHEDPEVKFNWYVDGVEVHNAKTKPREEQYNSTYRVVSVLTVLHQDWLNGKEYKCKVSNKALPAPIEKTISKAKGQPREPQVYTLPPSRDQLTKNQVKLTCLVKGFYPSDIAVEWESNGQPENNYKTTPPVLDSDGSFFLYSKLTVDKSRWQQGNVFSCSVMHEALHNHYTQKSLSLSPGK

SEQ ID NO: 1808 - protein, 217 aa, synthetic construct
  source 1..217: note = Heterodimeric Fc Backbone 6 monomer 1 (-)
APELLGGPSVFLFPPKPKDTLMISRTPEVTCVVVDVSHEDPEVKFNWYVDGVEVHNAKTKPREEEYASTYRVVSVLTVLHQDWLNGKEYKCKVSNKALPAPIEKTISKAKGQPREPQVYTLPPSREEMTKNQVSLTCDVSGFYPSDIAVEWESDGQPENNYKTTPPVLDSDGSFFLYSKLTVDKSRWEQGDVFSCSVMHEALHNHYTQKSLSLSPGK

SEQ ID NO: 1809 - protein, 217 aa, synthetic construct
  source 1..217: note = Heterodimeric Fc Backbone 6 monomer 2 (+)
APELLGGPSVFLFPPKPKDTLMISRTPEVTCVVVDVSHEDPEVKFNWYVDGVEVHNAKTKPREEQYASTYRVVSVLTVLHQDWLNGKEYKCKVSNKALPAPIEKTISKAKGQPREPQVYTLPPSREQMTKNQVKLTCLVKGFYPSDIAVEWESNGQPENNYKTTPPVLDSDGSFFLYSKLTVDKSRWQQGNVFSCSVMHEALHNHYTQKSLSLSPGK

SEQ ID NO: 1810 - protein, 217 aa, synthetic construct
  source 1..217: note = Heterodimeric Fc Backbone 7 monomer 1 (-)
APELLGGPSVFLFPPKPKDTLMISRTPEVTCVVVDVSHEDPEVKFNWYVDGVEVHNAKTKPREEEYSSTYRVVSVLTVLHQDWLNGKEYKCKVSNKALPAPIEKTISKAKGQPREPQVYTLPPSREEMTKNQVSLTCDVSGFYPSDIAVEWESDGQPENNYKTTPPVLDSDGSFFLYSKLTVDKSRWEQGDVFSCSVMHEALHNHYTQKSLSLSPGK

SEQ ID NO: 1811 - protein, 217 aa, synthetic construct
  source 1..217: note = Heterodimeric Fc Backbone 7 monomer 2 (+)
APELLGGPSVFLFPPKPKDTLMISRTPEVTCVVVDVSHEDPEVKFNWYVDGVEVHNAKTKPREEQYSSTYRVVSVLTVLHQDWLNGKEYKCKVSNKALPAPIEKTISKAKGQPREPQVYTLPPSREQMTKNQVKLTCLVKGFYPSDIAVEWESNGQPENNYKTTPPVLDSDGSFFLYSKLTVDKSRWQQGNVFSCSVMHEALHNHYTQKSLSLSPGK

SEQ ID NO: 1812 - protein, 217 aa, synthetic construct
  source 1..217: note = Heterodimeric Fc Backbone 8 monomer 1 (-)
APELLGGPSVFLFPPKPKDTLMISRTPEVTCVVVDVSHEDPEVKFNWYVDGVEVHNAKTKPREEEYNSTYRVVSVLTVLHQDWLNGKEYKCKVSNKALPAPIEKTISKAKGQPREPQVYTLPPSREEMTKNQVSLTCDVSGFYPSDIAVEWESDGQPENNYKTTPPVLDSDGSFFLYSKLTVDKSRWEQGDVFSCSVLHEALHSHYTQKSLSLSPGK

SEQ ID NO: 1813 - protein, 217 aa, synthetic construct
  source 1..217: note = Heterodimeric Fc Backbone 8 monomer 2 (+)
APELLGGPSVFLFPPKPKDTLMISRTPEVTCVVVDVSHEDPEVKFNWYVDGVEVHNAKTKPREEQYNSTYRVVSVLTVLHQDWLNGKEYKCKVSNKALPAPIEKTISKAKGQPREPQVYTLPPSREQMTKNQVKLTCLVKGFYPSDIAVEWESNGQPENNYKTTPPVLDSDGSFFLYSKLTVDKSRWQQGNVFSCSVLHEALHSHYTQKSLSLSPGK

SEQ ID NO: 1814 - protein, 217 aa, synthetic construct
  source 1..217: note = Heterodimeric Fc Backbone 9 monomer 1
APELLGGPSVFLFPPKPKDTLMISRTPEVTCVVVDVSHEDPEVKFNWYVDGVEVHNAKTKPREEEYNSTYRVVSVLTVLHQDWLNGKEYKCKVSNKALPAPIEKTISKAKGQPREPQVYTLPPSRDELTKNQVSLTCDVSGFYPSDIAVEWESDGQPENNYKTTPPVLDSDGSFFLYSKLTVDKSRWEQGDVFSCSVLHEALHSHYTQKSLSLSPGK

SEQ ID NO: 1815 - protein, 217 aa, synthetic construct
  source 1..217: note = Heterodimeric Fc Backbone 9 monomer 2
APELLGGPSVFLFPPKPKDTLMISRTPEVTCVVVDVSHEDPEVKFNWYVDGVEVHNAKTKPREEQYNSTYRVVSVLTVLHQDWLNGKEYKCKVSNKALPAPIEKTISKAKGQPREPQVYTLPPSRDQLTKNQVKLTCLVKGFYPSDIAVEWESNGQPENNYKTTPPVLDSDGSFFLYSKLTVDKSRWQQGNVFSCSVLHEALHSHYTQKSLSLSPGK

SEQ ID NO: 1816 - protein, 217 aa, synthetic construct
  source 1..217: note = Heterodimeric Fc Backbone 10 monomer 1
APELLGGPSVFLFPPKPKDTLMISRTPEVTCVVVDVSHEDPEVKFNWYVDGVEVHNAKTKPREEEYNSTYRVVSVLTVLHQDWLNGKEYKCKVSNKALPAPIEKTISKAKGQPREPQVYTLPPSREEMTKNQVSLTCDVSGFYPSDIAVEWESDGQPENNYKTTPPVLDSDGSFFLYSKLTVDKSRWEQGDVFSCSVLHEALHAHYTQKSLSLSPGK

SEQ ID NO: 1817 - protein, 217 aa, synthetic construct
  source 1..217: note = Heterodimeric Fc Backbone 10 monomer 2
APELLGGPSVFLFPPKPKDTLMISRTPEVTCVVVDVSHEDPEVKFNWYVDGVEVHNAKTKPREEQYNSTYRVVSVLTVLHQDWLNGKEYKCKVSNKALPAPIEKTISKAKGQPREPQVYTLPPSREQMTKNQVKLTCLVKGFYPSDIAVEWESNGQPENNYKTTPPVLDSDGSFFLYSKLTVDKSRWQQGNVFSCSVLHEALHAHYTQKSLSLSPGK

SEQ ID NO: 1818 - protein, 217 aa, synthetic construct
  source 1..217: note = Heterodimeric Fc Backbone 11 monomer 1
APELLGGPSVFLFPPKPKDTLMISRTPEVTCVVVDVSHEDPEVKFNWYVDGVEVHNAKTKPREEEYNSTYRVVSVLTVLHQDWLNGKEYKCKVSNKALPAPIEKTISKAKGQPREPQVYTLPPSRDELTKNQVSLTCDVSGFYPSDIAVEWESDGQPENNYKTTPPVLDSDGSFFLYSKLTVDKSRWEQGDVFSCSVLHEALHAHYTQKSLSLSPGK

SEQ ID NO: 1819 - protein, 217 aa, synthetic construct
  source 1..217: note = Heterodimeric Fc Backbone 11 monomer 2
APELLGGPSVFLFPPKPKDTLMISRTPEVTCVVVDVSHEDPEVKFNWYVDGVEVHNAKTKPREEQYNSTYRVVSVLTVLHQDWLNGKEYKCKVSNKALPAPIEKTISKAKGQPREPQVYTLPPSRDQLTKNQVKLTCLVKGFYPSDIAVEWESNGQPENNYKTTPPVLDSDGSFFLYSKLTVDKSRWQQGNVFSCSVLHEALHAHYTQKSLSLSPGK

SEQ ID NO: 1820 - protein, 217 aa, synthetic construct
  source 1..217: note = S239D/I332E : S239D/I332E_ADCC-enhanced Heterodimeric Backbone 1 monomer 1 (-)
APELLGGPDVFLFPPKPKDTLMISRTPEVTCVVVDVSHEDPEVKFNWYVDGVEVHNAKTKPREEEYNSTYRVVSVLTVLHQDWLNGKEYKCKVSNKALPAPEEKTISKAKGQPREPQVYTLPPSREEMTKNQVSLTCDVSGFYPSDIAVEWESDGQPENNYKTTPPVLDSDGSFFLYSKLTVDKSRWEQGDVFSCSVMHEALHNHYTQKSLSLSPGK

SEQ ID NO: 1821 - protein, 217 aa, synthetic construct
  source 1..217: note = S239D/I332E : S239D/I332E_ADCC-enhanced Heterodimeric Backbone 1 monomer 2 (+)
APELLGGPDVFLFPPKPKDTLMISRTPEVTCVVVDVSHEDPEVKFNWYVDGVEVHNAKTKPREEQYNSTYRVVSVLTVLHQDWLNGKEYKCKVSNKALPAPEEKTISKAKGQPREPQVYTLPPSREQMTKNQVKLTCLVKGFYPSDIAVEWESNGQPENNYKTTPPVLDSDGSFFLYSKLTVDKSRWQQGNVFSCSVMHEALHNHYTQKSLSLSPGK

SEQ ID NO: 1822 - protein, 217 aa, synthetic construct
  source 1..217: note = S239D : S239D_ADCC-enhanced Heterodimeric Backbone 2 monomer 1 (-)
APELLGGPDVFLFPPKPKDTLMISRTPEVTCVVVDVSHEDPEVKFNWYVDGVEVHNAKTKPREEEYNSTYRVVSVLTVLHQDWLNGKEYKCKVSNKALPAPIEKTISKAKGQPREPQVYTLPPSREEMTKNQVSLTCDVSGFYPSDIAVEWESDGQPENNYKTTPPVLDSDGSFFLYSKLTVDKSRWEQGDVFSCSVMHEALHNHYTQKSLSLSPGK

SEQ ID NO: 1823 - protein, 217 aa, synthetic construct
  source 1..217: note = S239D : S239D_ADCC-enhanced Heterodimeric Backbone 2 monomer 2 (+)
APELLGGPDVFLFPPKPKDTLMISRTPEVTCVVVDVSHEDPEVKFNWYVDGVEVHNAKTKPREEQYNSTYRVVSVLTVLHQDWLNGKEYKCKVSNKALPAPIEKTISKAKGQPREPQVYTLPPSREQMTKNQVKLTCLVKGFYPSDIAVEWESNGQPENNYKTTPPVLDSDGSFFLYSKLTVDKSRWQQGNVFSCSVMHEALHNHYTQKSLSLSPGK

SEQ ID NO: 1824 - protein, 217 aa, synthetic construct
  source 1..217: note = I332E : I332E_ADCC-enhanced Heterodimeric Backbone 3 monomer 1 (-)
APELLGGPSVFLFPPKPKDTLMISRTPEVTCVVVDVSHEDPEVKFNWYVDGVEVHNAKTKPREEEYNSTYRVVSVLTVLHQDWLNGKEYKCKVSNKALPAPEEKTISKAKGQPREPQVYTLPPSREEMTKNQVSLTCDVSGFYPSDIAVEWESDGQPENNYKTTPPVLDSDGSFFLYSKLTVDKSRWEQGDVFSCSVMHEALHNHYTQKSLSLSPGK

SEQ ID NO: 1825 - protein, 217 aa, synthetic construct
  source 1..217: note = I332E : I332E_ADCC-enhanced Heterodimeric Backbone 3 monomer 2 (+)
APELLGGPSVFLFPPKPKDTLMISRTPEVTCVVVDVSHEDPEVKFNWYVDGVEVHNAKTKPREEQYNSTYRVVSVLTVLHQDWLNGKEYKCKVSNKALPAPEEKTISKAKGQPREPQVYTLPPSREQMTKNQVKLTCLVKGFYPSDIAVEWESNGQPENNYKTTPPVLDSDGSFFLYSKLTVDKSRWQQGNVFSCSVMHEALHNHYTQKSLSLSPGK

SEQ ID NO: 1826 - protein, 217 aa, synthetic construct; identical to SEQ ID NO: 1798
  source 1..217: note = WT : S239D/I332E_ADCC-enhanced Heterodimeric Backbone 4 monomer 1 (-)

SEQ ID NO: 1827 - protein, 217 aa, synthetic construct; identical to SEQ ID NO: 1821
  source 1..217: note = WT : S239D/I332E_ADCC-enhanced Heterodimeric Backbone 4 monomer 2 (+)

SEQ ID NO: 1828 - protein, 217 aa, synthetic construct; identical to SEQ ID NO: 1798
  source 1..217: note = WT : S239D_ADCC-enhanced Heterodimeric Backbone 5 monomer 1 (-)

SEQ ID NO: 1829 - protein, 217 aa, synthetic construct; identical to SEQ ID NO: 1823
  source 1..217: note = WT : S239D_ADCC-enhanced Heterodimeric Backbone 5 monomer 2 (+)

SEQ ID NO: 1830 - protein, 217 aa, synthetic construct; identical to SEQ ID NO: 1798
  source 1..217: note = WT : I332E_ADCC-enhanced Heterodimeric Backbone 6 monomer 1 (-)

SEQ ID NO: 1831 - protein, 217 aa, synthetic construct; identical to SEQ ID NO: 1825
  source 1..217: note = WT : I332E_ADCC-enhanced Heterodimeric Backbone 6 monomer 2 (+)

SEQ ID NO: 1832 - protein, 217 aa, synthetic construct; identical to SEQ ID NO: 1820
  source 1..217: note = S239D/I332E : WT_ADCC-enhanced Heterodimeric Backbone 7 monomer 1 (-)

SEQ ID NO: 1833 - protein, 217 aa, synthetic construct; identical to SEQ ID NO: 1799
  source 1..217: note = S239D/I332E : WT_ADCC-enhanced Heterodimeric Backbone 7 monomer 2 (+)

SEQ ID NO: 1834 - protein, 217 aa, synthetic construct; identical to SEQ ID NO: 1822
  source 1..217: note = S239D : WT_ADCC-enhanced Heterodimeric Backbone 8 monomer 1 (-)

SEQ ID NO: 1835 - protein, 217 aa, synthetic construct; identical to SEQ ID NO: 1799
  source 1..217: note = S239D : WT_ADCC-enhanced Heterodimeric Backbone 8 monomer 2 (+)

SEQ ID NO: 1836 - protein, 217 aa, synthetic construct; identical to SEQ ID NO: 1824
  source 1..217: note = I332E : WT_ADCC-enhanced Heterodimeric Backbone 9 monomer 1 (-)

SEQ ID NO: 1837 - protein, 217 aa, synthetic construct; identical to SEQ ID NO: 1799
  source 1..217: note = I332E : WT_ADCC-enhanced Heterodimeric Backbone 9 monomer 2 (+)

SEQ ID NO: 1838 - protein, 217 aa, synthetic construct; identical to SEQ ID NO: 1820
  source 1..217: note = S239D/I332E : S239D_ADCC-enhanced Heterodimeric Backbone 10 monomer 1 (-)

SEQ ID NO: 1839 - protein, 217 aa, synthetic construct; identical to SEQ ID NO: 1823
  source 1..217: note = S239D/I332E : S239D_ADCC-enhanced Heterodimeric Backbone 10 monomer 2 (+)

SEQ ID NO: 1840 - protein, 217 aa, synthetic construct; identical to SEQ ID NO: 1820
  source 1..217: note = S239D/I332E : I332E_ADCC-enhanced Heterodimeric Backbone 11 monomer 1 (-)

SEQ ID NO: 1841 - protein, 217 aa, synthetic construct; identical to SEQ ID NO: 1825
  source 1..217: note = S239D/I332E : I332E_ADCC-enhanced Heterodimeric Backbone 11 monomer 2 (+)

SEQ ID NO: 1842 - protein, 217 aa, synthetic construct; identical to SEQ ID NO: 1822
  source 1..217: note = S239D : S239D/I332E_ADCC-enhanced Heterodimeric Backbone 12 monomer 1 (-)

SEQ ID NO: 1843 - protein, 217 aa, synthetic construct; identical to SEQ ID NO: 1821
  source 1..217: note = S239D : S239D/I332E_ADCC-enhanced Heterodimeric Backbone 12 monomer 2 (+)

SEQ ID NO: 1844 - protein, 217 aa, synthetic construct; identical to SEQ ID NO: 1824
  source 1..217: note = I332E : S239D/I332E_ADCC-enhanced Heterodimeric Backbone 13 monomer 1 (-)

SEQ ID NO: 1845 - protein, 217 aa, synthetic construct; identical to SEQ ID NO: 1821
  source 1..217: note = I332E : S239D/I332E_ADCC-enhanced Heterodimeric Backbone 13 monomer 2 (+)

SEQ ID NO: 1846 - protein, 217 aa, synthetic construct; identical to SEQ ID NO: 1822
  source 1..217: note = S239D : I332E_ADCC-enhanced Heterodimeric Backbone 14 monomer 1 (-)

SEQ ID NO: 1847 - protein, 217 aa, synthetic construct; identical to SEQ ID NO: 1825
  source 1..217: note = S239D : I332E_ADCC-enhanced Heterodimeric Backbone 14 monomer 2 (+)

SEQ ID NO: 1848 - protein, 217 aa, synthetic construct; identical to SEQ ID NO: 1824
  source 1..217: note = I332E : S239D_ADCC-enhanced Heterodimeric Backbone 15 monomer 1 (-)

SEQ ID NO: 1849 - protein, 217 aa, synthetic construct; identical to SEQ ID NO: 1823
  source 1..217: note = I332E : S239D_ADCC-enhanced Heterodimeric Backbone 15 monomer 2 (+)

SEQ ID NO: 1850 - protein, 217 aa, synthetic construct
  source 1..217: note = S239D/I332E : S239D/I332E_ADCC-enhanced Heterodimeric Backbone 1 w/ Xtend monomer 1 (-)
APELLGGPDVFLFPPKPKDTLMISRTPEVTCVVVDVSHEDPEVKFNWYVDGVEVHNAKTKPREEEYNSTYRVVSVLTVLHQDWLNGKEYKCKVSNKALPAPEEKTISKAKGQPREPQVYTLPPSREEMTKNQVSLTCDVSGFYPSDIAVEWESDGQPENNYKTTPPVLDSDGSFFLYSKLTVDKSRWEQGDVFSCSVLHEALHSHYTQKSLSLSPGK

SEQ ID NO: 1851 - protein, 217 aa, synthetic construct
  source 1..217: note = S239D/I332E : S239D/I332E_ADCC-enhanced Heterodimeric Backbone 1 w/ Xtend monomer 2 (+)
APELLGGPDVFLFPPKPKDTLMISRTPEVTCVVVDVSHEDPEVKFNWYVDGVEVHNAKTKPREEQYNSTYRVVSVLTVLHQDWLNGKEYKCKVSNKALPAPEEKTISKAKGQPREPQVYTLPPSREQMTKNQVKLTCLVKGFYPSDIAVEWESNGQPENNYKTTPPVLDSDGSFFLYSKLTVDKSRWQQGNVFSCSVLHEALHSHYTQKSLSLSPGK

SEQ ID NO: 1852 - protein, 217 aa, synthetic construct
  source 1..217: note = S239D : S239D_ADCC-enhanced Heterodimeric Backbone 2 w/ Xtend monomer 1 (-)
APELLGGPDVFLFPPKPKDTLMISRTPEVTCVVVDVSHEDPEVKFNWYVDGVEVHNAKTKPREEEYNSTYRVVSVLTVLHQDWLNGKEYKCKVSNKALPAPIEKTISKAKGQPREPQVYTLPPSREEMTKNQVSLTCDVSGFYPSDIAVEWESDGQPENNYKTTPPVLDSDGSFFLYSKLTVDKSRWEQGDVFSCSVLHEALHSHYTQKSLSLSPGK

SEQ ID NO: 1853 - protein, 217 aa, synthetic construct
  source 1..217: note = S239D : S239D_ADCC-enhanced Heterodimeric Backbone 2 w/ Xtend monomer 2 (+)
APELLGGPDVFLFPPKPKDTLMISRTPEVTCVVVDVSHEDPEVKFNWYVDGVEVHNAKTKPREEQYNSTYRVVSVLTVLHQDWLNGKEYKCKVSNKALPAPIEKTISKAKGQPREPQVYTLPPSREQMTKNQVKLTCLVKGFYPSDIAVEWESNGQPENNYKTTPPVLDSDGSFFLYSKLTVDKSRWQQGNVFSCSVLHEALHSHYTQKSLSLSPGK

SEQ ID NO: 1854 - protein, 217 aa, synthetic construct
  source 1..217: note = I332E : I332E_ADCC-enhanced Heterodimeric Backbone 3 w/ Xtend monomer 1 (-)
APELLGGPSVFLFPPKPKDTLMISRTPEVTCVVVDVSHEDPEVKFNWYVDGVEVHNAKTKPREEEYNSTYRVVSVLTVLHQDWLNGKEYKCKVSNKALPAPEEKTISKAKGQPREPQVYTLPPSREEMTKNQVSLTCDVSGFYPSDIAVEWESDGQPENNYKTTPPVLDSDGSFFLYSKLTVDKSRWEQGDVFSCSVLHEALHSHYTQKSLSLSPGK

SEQ ID NO: 1855 - protein, 217 aa, synthetic construct
  source 1..217: note = I332E : I332E_ADCC-enhanced Heterodimeric Backbone 3 w/ Xtend monomer 2 (+)
APELLGGPSVFLFPPKPKDTLMISRTPEVTCVVVDVSHEDPEVKFNWYVDGVEVHNAKTKPREEQYNSTYRVVSVLTVLHQDWLNGKEYKCKVSNKALPAPEEKTISKAKGQPREPQVYTLPPSREQMTKNQVKLTCLVKGFYPSDIAVEWESNGQPENNYKTTPPVLDSDGSFFLYSKLTVDKSRWQQGNVFSCSVLHEALHSHYTQKSLSLSPGK

SEQ ID NO: 1856 - protein, 217 aa, synthetic construct; identical to SEQ ID NO: 1812
  source 1..217: note = WT : S239D/I332E_ADCC-enhanced Heterodimeric Backbone 4 w/ Xtend monomer 1 (-)

SEQ ID NO: 1857 - protein, 217 aa, synthetic construct; identical to SEQ ID NO: 1851
  source 1..217: note = WT : S239D/I332E_ADCC-enhanced Heterodimeric Backbone 4 w/ Xtend monomer 2 (+)

SEQ ID NO: 1858 - protein, 217 aa, synthetic construct; identical to SEQ ID NO: 1812
  source 1..217: note = WT : S239D_ADCC-enhanced Heterodimeric Backbone 5 w/ Xtend monomer 1 (-)

SEQ ID NO: 1859 - protein, 217 aa, synthetic construct; identical to SEQ ID NO: 1853
  source 1..217: note = WT : S239D_ADCC-enhanced Heterodimeric Backbone 5 w/ Xtend monomer 2 (+)

SEQ ID NO: 1860 - protein, 217 aa, synthetic construct; identical to SEQ ID NO: 1812
  source 1..217: note = WT : I332E_ADCC-enhanced Heterodimeric Backbone 6 w/ Xtend monomer 1 (-)

SEQ ID NO: 1861 - protein, 217 aa, synthetic construct; identical to SEQ ID NO: 1855
  source 1..217: note = WT : I332E_ADCC-enhanced Heterodimeric Backbone 6 w/ Xtend monomer 2 (+)

SEQ ID NO: 1862 - protein, 217 aa, synthetic construct; identical to SEQ ID NO: 1850
  source 1..217: note = S239D/I332E : WT_ADCC-enhanced Heterodimeric Backbone 7 w/ Xtend monomer 1 (-)

SEQ ID NO: 1863 - protein, 217 aa, synthetic construct; identical to SEQ ID NO: 1813
  source 1..217: note = S239D/I332E : WT_ADCC-enhanced Heterodimeric Backbone 7 w/ Xtend monomer 2 (+)

SEQ ID NO: 1864 - protein, 217 aa, synthetic construct; identical to SEQ ID NO: 1852
  source 1..217: note = S239D : WT_ADCC-enhanced Heterodimeric Backbone 8 w/ Xtend monomer 1 (-)

SEQ ID NO: 1865 - protein, 217 aa, synthetic construct; identical to SEQ ID NO: 1813
  source 1..217: note = S239D : WT_ADCC-enhanced Heterodimeric Backbone 8 w/ Xtend monomer 2 (+)

SEQ ID NO: 1866 - protein, 217 aa, synthetic construct; identical to SEQ ID NO: 1854
  source 1..217: note = I332E : WT_ADCC-enhanced Heterodimeric Backbone 9 w/ Xtend monomer 1 (-)

SEQ ID NO: 1867 - protein, 217 aa, synthetic construct; identical to SEQ ID NO: 1813
  source 1..217: note = I332E : WT_ADCC-enhanced Heterodimeric Backbone 9 w/ Xtend monomer 2 (+)

SEQ ID NO: 1868 - protein, 217 aa, synthetic construct; identical to SEQ ID NO: 1850
  source 1..217: note = S239D/I332E : S239D_ADCC-enhanced Heterodimeric Backbone 10 w/ Xtend monomer 1 (-)

SEQ ID NO: 1869 - protein, 217 aa, synthetic construct; identical to SEQ ID NO: 1853
  source 1..217: note = S239D/I332E : S239D_ADCC-enhanced Heterodimeric Backbone 10 w/ Xtend monomer 2 (+)

SEQ ID NO: 1870 - protein, 217 aa, synthetic construct; identical to SEQ ID NO: 1850
  source 1..217: note = S239D/I332E : I332E_ADCC-enhanced Heterodimeric Backbone 11 w/ Xtend monomer 1 (-)

SEQ ID NO: 1871 - protein, 217 aa, synthetic construct; identical to SEQ ID NO: 1855
  source 1..217: note = S239D/I332E : I332E_ADCC-enhanced Heterodimeric Backbone 11 w/ Xtend monomer 2 (+)

SEQ ID NO: 1872 - protein, 217 aa, synthetic construct; identical to SEQ ID NO: 1852
  source 1..217: note = S239D : S239D/I332E_ADCC-enhanced Heterodimeric Backbone 12 w/ Xtend monomer 1 (-)

SEQ ID NO: 1873 - protein, 217 aa, synthetic construct; identical to SEQ ID NO: 1851
  source 1..217: note = S239D : S239D/I332E_ADCC-enhanced Heterodimeric Backbone 12 w/ Xtend monomer 2 (+)

SEQ ID NO: 1874 - protein, 217 aa, synthetic construct; identical to SEQ ID NO: 1854
  source 1..217: note = I332E : S239D/I332E_ADCC-enhanced Heterodimeric Backbone 13 w/ Xtend monomer 1 (-)

SEQ ID NO: 1875 - protein, 217 aa, synthetic construct; identical to SEQ ID NO: 1851
  source 1..217: note = I332E : S239D/I332E_ADCC-enhanced Heterodimeric Backbone 13 w/ Xtend monomer 2 (+)

SEQ ID NO: 1876 - protein, 217 aa, synthetic construct; identical to SEQ ID NO: 1852
  source 1..217: note = S239D : I332E_ADCC-enhanced Heterodimeric Backbone 14 w/ Xtend monomer 1 (-)

SEQ ID NO: 1877 - protein, 217 aa, synthetic construct; identical to SEQ ID NO: 1855
  source 1..217: note = S239D : I332E_ADCC-enhanced Heterodimeric Backbone 14 w/ Xtend monomer 2 (+)

SEQ ID NO: 1878 - protein, 217 aa, synthetic construct; identical to SEQ ID NO: 1854
  source 1..217: note = I332E : S239D_ADCC-enhanced Heterodimeric Backbone 15 w/ Xtend monomer 1 (-)

SEQ ID NO: 1879 - protein, 217 aa, synthetic construct; identical to SEQ ID NO: 1853
  source 1..217: note = I332E : S239D_ADCC-enhanced Heterodimeric Backbone 15 w/ Xtend monomer 2 (+)

SEQ ID NO: 1880 - protein, 329 aa, synthetic construct
  source 1..329: note = 1 + 1 Fab-scFv-Fc Backbone 1_Fab-Fc Side
ASTKGPSVFPLAPSSKSTSGGTAALGCLVKDYFPEPVTVSWNSGALTSGVHTFPAVLQSSGLYSLSSVVTVPSSSLGTQTYICNVNHKPSDTKVDKKVEPKSCDKTHTCPPCPAPPVAGPSVFLFPPKPKDTLMISRTPEVTCVVVDVKHEDPEVKFNWYVDGVEVHNAKTKPREEEYNSTYRVVSVLTVLHQDWLNGKEYKCKVSNKALPAPIEKTISKAKGQPREPQVYTLPPSREEMTKNQVSLTCDVSGFYPSDIAVEWESDGQPENNYKTTPPVLDSDGSFFLYSKLTVDKSRWEQGDVFSCSVMHEALHNHYTQKSLSLSPGK

SEQ ID NO: 1881 - protein, 231 aa, synthetic construct
  source 1..231: note = 1 + 1 Fab-scFv-Fc Backbone 1_scFv-Fc Side
EPKSSDKTHTCPPCPAPPVAGPSVFLFPPKPKDTLMISRTPEVTCVVVDVKHEDPEVKFNWYVDGVEVHNAKTKPREEQYNSTYRVVSVLTVLHQDWLNGKEYKCKVSNKALPAPIEKTISKAKGQPREPQVYTLPPSREQMTKNQVKLTCLVKGFYPSDIAVEWESNGQPENNYKTTPPVLDSDGSFFLYSKLTVDKSRWQQGNVFSCSVMHEALHNHYTQKSLSLSPGK

SEQ ID NO: 1882 - protein, 329 aa, synthetic construct; identical to SEQ ID NO: 1880
  source 1..329: note = 1 + 1 Fab-scFv-Fc Backbone 2_Fab-Fc Side

SEQ ID NO: 1883 - protein, 231 aa, synthetic construct
  source 1..231: note = 1 + 1 Fab-scFv-Fc Backbone 2_scFv-Fc Side
EPKSSDKTHTCPPCPAPPVAGPSVFLFPPKPKDTLMISRTPEVTCVVVDVKHEDPEVKFNWYVDGVEVHNAKTKPREEQYNSTYRVVSVLTVLHQDWLNGKEYKCKVSNKALPAPIEKTISKAKGQPREPQVYTLPPSREEMTKNQVKLTCLVKGFYPSDIAVEWESNGQPENNYKTTPPVLDSDGSFFLYSKLTVDKSRWQQGNVFSCSVMHEALHNHYTQKSLSLSPGK

SEQ ID NO: 1884 - protein, 329 aa, synthetic construct
  source 1..329: note = 1 + 1 Fab-scFv-Fc Backbone 3_Fab-Fc Side
ASTKGPSVFPLAPSSKSTSGGTAALGCLVKDYFPEPVTVSWNSGALTSGVHTFPAVLQSSGLYSLSSVVTVPSSSLGTQTYICNVNHKPSDTKVDKKVEPKSCDKTHTCPPCPAPPVAGPSVFLFPPKPKDTLMISRTPEVTCVVVDVKHEDPEVKFNWYVDGVEVHNAKTKPREEEYNSTYRVVSVLTVLHQDWLNGKEYKCKVSNKALPAPIEKTISKAKGQPREPQVYTLPPSREEMTKNQVSLTCEVSGFYPSDIAVEWESDGQPENNYKTTPPVLDSDGSFFLYSKLTVDKSRWEQGDVFSCSVMHEALHNHYTQKSLSLSPGK

SEQ ID NO: 1885 - protein, 231 aa, synthetic construct; identical to SEQ ID NO: 1883
  source 1..231: note = 1 + 1 Fab-scFv-Fc Backbone 3_scFv-Fc Side

SEQ ID NO: 1886 - protein, 329 aa, synthetic construct
  source 1..329: note = 1 + 1 Fab-scFv-Fc Backbone 4_Fab-Fc Side
ASTKGPSVFPLAPSSKSTSGGTAALGCLVKDYFPEPVTVSWNSGALTSGVHTFPAVLQSSGLYSLSSVVTVPSSSLGTQTYICNVNHKPSDTKVDKKVEPKSCDKTHTCPPCPAPPVAGPSVFLFPPKPKDTLMISRTPEVTCVVVDVKHEDPEVKFNWYVDGVEVHNAKTKPREEEYNSTYRVVSVLTVLHQDWLNGKEYKCKVSNKALPAPIEKTISKAKGQPREPQVYTLPPSREEMTENEVSLTCLVKGFYPSDIAVEWESDGQPENNYKTTPPVLDSDGSFFLYSKLEVDKSRWEQGDVFSCSVMHEALHNHYTQKSLSLSPGK

SEQ ID NO: 1887 - protein, 231 aa, synthetic construct
  source 1..231: note = 1 + 1 Fab-scFv-Fc Backbone 4_scFv-Fc Side
EPKSSDKTHTCPPCPAPPVAGPSVFLFPPKPKDTLMISRTPEVTCVVVDVKHEDPEVKFNWYVDGVEVHNAKTKPREEQYNSTYRVVSVLTVLHQDWLNGKEYKCKVSNKALPAPIEKTISKAKGQPREPQVYTLPPSREEMTKNQVSLTCLVKGFYPSDIAVEWESNGQPENNYKTTPPVLDSKGSFFLYSKLTVDKSRWQQGNVFSCSVMHEALHNHYTQKSLSLSPGK

SEQ ID NO: 1888 - protein, 329 aa, synthetic construct
  source 1..329: note = 1 + 1 Fab-scFv-Fc Backbone 5_Fab-Fc Side
ASTKGPSVFPLAPSSKSTSGGTAALGCLVKDYFPEPVTVSWNSGALTSGVHTFPAVLQSSGLYSLSSVVTVPSSSLGTQTYICNVNHKPSDTKVDKKVEPKSCDKTHTCPPCPAPPVAGPSVFLFPPKPKDTLMISRTPEVTCVVVDVKHEDPEVKFNWYVDGVEVHNAKTKPREEEYNSTYRVVSVLTVLHQDWLNGKEYKCKVSNKALPAPIEKTISKAKGQPREPQVYTLPPSRDELTKNQVSLTCDVSGFYPSDIAVEWESDGQPENNYKTTPPVLDSDGSFFLYSKLTVDKSRWEQGDVFSCSVMHEALHNHYTQKSLSLSPGK

SEQ ID NO: 1889 - protein, 231 aa, synthetic construct
  source 1..231: note = 1 + 1 Fab-scFv-Fc Backbone 5_scFv-Fc Side
EPKSSDKTHTCPPCPAPPVAGPSVFLFPPKPKDTLMISRTPEVTCVVVDVKHEDPEVKFNWYVDGVEVHNAKTKPREEQYNSTYRVVSVLTVLHQDWLNGKEYKCKVSNKALPAPIEKTISKAKGQPREPQVYTLPPSRDQLTKNQVKLTCLVKGFYPSDIAVEWESNGQPENNYKTTPPVLDSDGSFFLYSKLTVDKSRWQQGNVFSCSVMHEALHNHYTQKSLSLSPGK

SEQ ID NO: 1890 - protein, 329 aa, synthetic construct
  source 1..329: note = 1 + 1 Fab-scFv-Fc Backbone 6_Fab-Fc Side
ASTKGPSVFPLAPSSKSTSGGTAALGCLVKDYFPEPVTVSWNSGALTSGVHTFPAVLQSSGLYSLSSVVTVPSSSLGTQTYICNVNHKPSDTKVDKKVEPKSCDKTHTCPPCPAPPVAGPSVFLFPPKPKDTLMISRTPEVTCVVVDVKHEDPEVKFNWYVDGVEVHNAKTKPREEEYASTYRVVSVLTVLHQDWLNGKEYKCKVSNKALPAPIEKTISKAKGQPREPQVYTLPPSREEMTKNQVSLTCDVSGFYPSDIAVEWESDGQPENNYKTTPPVLDSDGSFFLYSKLTVDKSRWEQGDVFSCSVMHEALHNHYTQKSLSLSPGK

SEQ ID NO: 1891 - protein, 231 aa, synthetic construct
  source 1..231: note = 1 + 1 Fab-scFv-Fc Backbone 6_scFv-Fc Side
EPKSSDKTHTCPPCPAPPVAGPSVFLFPPKPKDTLMISRTPEVTCVVVDVKHEDPEVKFNWYVDGVEVHNAKTKPREEQYASTYRVVSVLTVLHQDWLNGKEYKCKVSNKALPAPIEKTISKAKGQPREPQVYTLPPSREQMTKNQVKLTCLVKGFYPSDIAVEWESNGQPENNYKTTPPVLDSDGSFFLYSKLTVDKSRWQQGNVFSCSVMHEALHNHYTQKSLSLSPGK

SEQ ID NO: 1892 - protein, 329 aa, synthetic construct
  source 1..329: note = 1 + 1 Fab-scFv-Fc Backbone 7_Fab-Fc Side
ASTKGPSVFPLAPSSKSTSGGTAALGCLVKDYFPEPVTVSWNSGALTSGVHTFPAVLQSSGLYSLSSVVTVPSSSLGTQTYICNVNHKPSDTKVDKKVEPKSCDKTHTCPPCPAPPVAGPSVFLFPPKPKDTLMISRTPEVTCVVVDVKHEDPEVKFNWYVDGVEVHNAKTKPREEEYSSTYRVVSVLTVLHQDWLNGKEYKCKVSNKALPAPIEKTISKAKGQPREPQVYTLPPSREEMTKNQVSLTCDVSGFYPSDIAVEWESDGQPENNYKTTPPVLDSDGSFFLYSKLTVDKSRWEQGDVFSCSVMHEALHNHYTQKSLSLSPGK

SEQ ID NO: 1893 - protein, 231 aa, synthetic construct
  source 1..231: note = 1 + 1 Fab-scFv-Fc Backbone 7_scFv-Fc Side
EPKSSDKTHTCPPCPAPPVAGPSVFLFPPKPKDTLMISRTPEVTCVVVDVKHEDPEVKFNWYVDGVEVHNAKTKPREEQYSSTYRVVSVLTVLHQDWLNGKEYKCKVSNKALPAPIEKTISKAKGQPREPQVYTLPPSREQMTKNQVKLTCLVKGFYPSDIAVEWESNGQPENNYKTTPPVLDSDGSFFLYSKLTVDKSRWQQGNVFSCSVMHEALHNHYTQKSLSLSPGK

SEQ ID NO: 1894 - protein, 327 aa, synthetic construct
  source 1..327: note = 1 + 1 Fab-scFv-Fc Backbone 8_Fab-Fc Side
ASTKGPSVFPLAPCSRSTSESTAALGCLVKDYFPEPVTVSWNSGALTSGVHTFPAVLQSSGLYSLSSVVTVPSSSLGTKTYTCNVDHKPSDTKVDKRVESKYGPPCPPCPAPEFLGGPSVFLFPPKPKDTLMISRTPEVTCVVVDVSQEDPEVQFNWYVDGVEVHNAKTKPREEEFNSTYRVVSVLTVLHQDWLNGKEYKCKVSNKGLPSSIEKTISKAKGQPREPQVYTLPPSQEEMTKNQVSLTCDVSGFYPSDIAVEWESDGQPENNYKTTPPVLDSDGSFFLYSRLTVDKSRWEEGDVFSCSVMHEALHNHYTQKSLSLSLGK

SEQ ID NO: 1895 - protein, 229 aa, synthetic construct
  source 1..229: note = 1 + 1 Fab-scFv-Fc Backbone 8_scFv-Fc Side
ESKYGPPCPPCPAPEFLGGPSVFLFPPKPKDTLMISRTPEVTCVVVDVSQEDPEVQFNWYVDGVEVHNAKTKPREEQFNSTYRVVSVLTVLHQDWLNGKEYKCKVSNKGLPSSIEKTISKAKGQPREPQVYTLPPSQEQMTKNQVKLTCLVKGFYPSDIAVEWESNGQPENNYKTTPPVLDSDGSFFLYSRLTVDKSRWQEGNVFSCSVMHEALHNHYTQKSLSLSLGK

SEQ ID NO: 1896 - protein, 326 aa, synthetic construct
  source 1..326: note = 1 + 1 Fab-scFv-Fc Backbone 9_Fab-Fc Side
ASTKGPSVFPLAPCSRSTSESTAALGCLVKDYFPEPVTVSWNSGALTSGVHTFPAVLQSSGLYSLSSVVTVPSSNFGTQTYTCNVDHKPSDTKVDKTVERKCCVECPPCPAPPVAGPSVFLFPPKPKDTLMISRTPEVTCVVVDVSHEDPEVQFNWYVDGVEVHNAKTKPREEEFNSTFRVVSVLTVVHQDWLNGKEYKCKVSNKGLPAPIEKTISKTKGQPREPQVYTLPPSREEMTKNQVSLTCDVSGFYPSDIAVEWESDGQPENNYKTTPPMLDSDGSFFLYSKLTVDKSRWEQGDVFSCSVMHEALHNHYTQKSLSLSPGK

SEQ ID NO: 1897 - protein, 228 aa, synthetic construct
  source 1..228: note = 1 + 1 Fab-scFv-Fc Backbone 9_scFv-Fc Side
ERKCCVECPPCPAPPVAGPSVFLFPPKPKDTLMISRTPEVTCVVVDVSHEDPEVQFNWYVDGVEVHNAKTKPREEQFNSTFRVVSVLTVVHQDWLNGKEYKCKVSNKGLPAPIEKTISKTKGQPREPQVYTLPPSREQMTKNQVKLTCLVKGFYPSDIAVEWESNGQPENNYKTTPPMLDSDGSFFLYSKLTVDKSRWQQGNVFSCSVMHEALHNHYTQKSLSLSPGK

SEQ ID NO: 1898 - protein, 326 aa, synthetic construct
  source 1..326: note = 1 + 1 Fab-scFv-Fc Backbone 10_Fab-Fc Side
ASTKGPSVFPLAPCSRSTSESTAALGCLVKDYFPEPVTVSWNSGALTSGVHTFPAVLQSSGLYSLSSVVTVPSSNFGTQTYTCNVDHKPSDTKVDKTVERKCCVECPPCPAPPVAGPSVFLFPPKPKDTLMISRTPEVTCVVVDVKHEDPEVQFNWYVDGVEVHNAKTKPREEEFNSTFRVVSVLTVVHQDWLNGKEYKCKVSNKGLPAPIEKTISKTKGQPREPQVYTLPPSREEMTKNQVSLTCDVSGFYPSDIAVEWESDGQPENNYKTTPPMLDSDGSFFLYSKLTVDKSRWEQGDVFSCSVMHEALHNHYTQKSLSLSPGK

SEQ ID NO: 1899 - protein, 228 aa, synthetic construct
  source 1..228: note = 1 + 1 Fab-scFv-Fc Backbone 10_scFv-Fc Side
ERKCCVECPPCPAPPVAGPSVFLFPPKPKDTLMISRTPEVTCVVVDVKHEDPEVQFNWYVDGVEVHNAKTKPREEQFNSTFRVVSVLTVVHQDWLNGKEYKCKVSNKGLPAPIEKTISKTKGQPREPQVYTLPPSREQMTKNQVKLTCLVKGFYPSDIAVEWESNGQPENNYKTTPPMLDSDGSFFLYSKLTVDKSRWQQGNVFSCSVMHEALHNHYTQKSLSLSPGK

SEQ ID NO: 1900 - protein, 329 aa, synthetic construct
  source 1..329: note = 1 + 1 Fab-scFv-Fc Backbone 11_Fab-Fc Side
ASTKGPSVFPLAPSSKSTSGGTAALGCLVKDYFPEPVTVSWNSGALTSGVHTFPAVLQSSGLYSLSSVVTVPSSSLGTQTYICNVNHKPSDTKVDKKVEPKSCDKTHTCPPCPAPPVAGPSVFLFPPKPKDTLMISRTPEVTCVVVDVKHEDPEVKFNWYVDGVEVHNAKTKPREEEYNSTYRVVSVLTVLHQDWLNGKEYKCKVSNKALPAPIEKTISKAKGQPREPQVYTLPPSREEMTKNQVSLTCDVSGFYPSDIAVEWESDGQPENNYKTTPPVLDSDGSFFLYSKLTVDKSRWEQGDVFSCSVLHEALHSHYTQKSLSLSPGK

SEQ ID NO: 1901 - protein, 231 aa, synthetic construct
  source 1..231: note = 1 + 1 Fab-scFv-Fc Backbone 11_scFv-Fc Side
EPKSSDKTHTCPPCPAPPVAGPSVFLFPPKPKDTLMISRTPEVTCVVVDVKHEDPEVKFNWYVDGVEVHNAKTKPREEQYNSTYRVVSVLTVLHQDWLNGKEYKCKVSNKALPAPIEKTISKAKGQPREPQVYTLPPSREQMTKNQVKLTCLVKGFYPSDIAVEWESNGQPENNYKTTPPVLDSDGSFFLYSKLTVDKSRWQQGNVFSCSVLHEALHSHYTQKSLSLSPGK

SEQ ID NO: 1902 - protein, 329 aa, synthetic construct
  source 1..329: note = 1 + 1 Fab-scFv-Fc Backbone 12_Fab-Fc Side
ASTKGPSVFPLAPSSKSTSGGTAALGCLVKDYFPEPVTVSWNSGALTSGVHTFPAVLQSSGLYSLSSVVTVPSSSLGTQTYICNVNHKPSNTKVDKKVEPKSCDKTHTCPPCPAPPVAGPSVFLFPPKPKDTLMISRTPEVTCVVVDVKHEDPEVKFNWYVDGVEVHNAKTKPREEQYNSTYRVVSVLTVLHQDWLNGKEYKCKVSNKALPAPIEKTISKAKGQPREPQVYTLPPSREEMTKNQVSLTCDVAGFYPSDIAVEWESNGQPENNYKTTPPVLDSDGSFFLYSKLTVDKSRWQQGNVFSCSVMHEALHNHYTQKSLSLSPGK

SEQ ID NO: 1903 - protein, 231 aa, synthetic construct
  source 1..231: note = 1 + 1 Fab-scFv-Fc Backbone 12_scFv-Fc Side
ERKSSDKTHTCPPRPAPPVAGPSVFLFPPKPKDTLMISRTPEVTCVVVDVKHEDPEVKFKWYVDGVEVHNAKTKPREEQYNSTYRVVSVLTVLHQDWLNGKEYKCKVSNKALPAPIEKTISKAKGQPREPQVYTLPPSREQMTKNQVKLTCLVKGFYPSDIAVEWESNGQPENNYKTTPPVLDSDGSFFLYSKLTVDKSRWQQGNVFSCSVMHEALHNHYTQKSLSLSPGK

SEQ ID NO: 1904 - protein, 216 aa, synthetic construct
  source 1..216: note = FcKO Heterodimeric Fc Backbone 1 monomer 1 (-)
APPVAGPSVFLFPPKPKDTLMISRTPEVTCVVVDVKHEDPEVKFNWYVDGVEVHNAKTKPREEEYNSTYRVVSVLTVLHQDWLNGKEYKCKVSNKALPAPIEKTISKAKGQPREPQVYTLPPSREEMTKNQVSLTCDVSGFYPSDIAVEWESDGQPENNYKTTPPVLDSDGSFFLYSKLTVDKSRWEQGDVFSCSVMHEALHNHYTQKSLSLSPGK

SEQ ID NO: 1905 - protein, 216 aa, synthetic construct
  source 1..216: note = FcKO Heterodimeric Fc Backbone 1 monomer 2 (+)
APPVAGPSVFLFPPKPKDTLMISRTPEVTCVVVDVKHEDPEVKFNWYVDGVEVHNAKTKPREEQYNSTYRVVSVLTVLHQDWLNGKEYKCKVSNKALPAPIEKTISKAKGQPREPQVYTLPPSREQMTKNQVKLTCLVKGFYPSDIAVEWESNGQPENNYKTTPPVLDSDGSFFLYSKLTVDKSRWQQGNVFSCSVMHEALHNHYTQKSLSLSPGK

SEQ ID NO: 1906 - protein, 216 aa, synthetic construct; identical to SEQ ID NO: 1904
  source 1..216: note = FcKO Heterodimeric Fc Backbone 2 monomer 1 (-)

SEQ ID NO: 1907 - protein, 216 aa, synthetic construct
  source 1..216: note = FcKO Heterodimeric Fc Backbone monomer 2 (+)
APPVAGPSVFLFPPKPKDTLMISRTPEVTCVVVDVKHEDPEVKFNWYVDGVEVHNAKTKPREEQYNSTYRVVSVLTVLHQDWLNGKEYKCKVSNKALPAPIEKTISKAKGQPREPQVYTLPPSREEMTKNQVKLTCLVKGFYPSDIAVEWESNGQPENNYKTTPPVLDSDGSFFLYSKLTVDKSRWQQGNVFSCSVMHEALHNHYTQKSLSLSPGK

SEQ ID NO: 1908 - protein, 216 aa, synthetic construct
  source 1..216: note = FcKO Heterodimeric Fc Backbone 3 monomer 1 (-)
APPVAGPSVFLFPPKPKDTLMISRTPEVTCVVVDVKHEDPEVKFNWYVDGVEVHNAKTKPREEEYNSTYRVVSVLTVLHQDWLNGKEYKCKVSNKALPAPIEKTISKAKGQPREPQVYTLPPSREEMTKNQVSLTCEVSGFYPSDIAVEWESDGQPENNYKTTPPVLDSDGSFFLYSKLTVDKSRWEQGDVFSCSVMHEALHNHYTQKSLSLSPGK

SEQ ID NO: 1909 - protein, 216 aa, synthetic construct; identical to SEQ ID NO: 1907
  source 1..216: note = FcKO Heterodimeric Fc Backbone 3 monomer 2 (+)

SEQ ID NO: 1910 - protein, 216 aa, synthetic construct
  source 1..216: note = FcKO Heterodimeric Fc Backbone 4 monomer 1 (-)
APPVAGPSVFLFPPKPKDTLMISRTPEVTCVVVDVKHEDPEVKFNWYVDGVEVHNAKTKPREEEYNSTYRVVSVLTVLHQDWLNGKEYKCKVSNKALPAPIEKTISKAKGQPREPQVYTLPPSREEMTENEVSLTCLVKGFYPSDIAVEWESDGQPENNYKTTPPVLDSDGSFFLYSKLEVDKSRWEQGDVFSCSVMHEALHNHYTQKSLSLSPGK

SEQ ID NO: 1911 - protein, 216 aa, synthetic construct
  source 1..216: note = FcKO Heterodimeric Fc Backbone 4 monomer 2 (+)
APPVAGPSVFLFPPKPKDTLMISRTPEVTCVVVDVKHEDPEVKFNWYVDGVEVHNAKTKPREEQYNSTYRVVSVLTVLHQDWLNGKEYKCKVSNKALPAPIEKTISKAKGQPREPQVYTLPPSREEMTKNQVSLTCLVKGFYPSDIAVEWESNGQPENNYKTTPPVLDSKGSFFLYSKLTVDKSRWQQGNVFSCSVMHEALHNHYTQKSLSLSPGK

SEQ ID NO: 1912 - protein, 216 aa, synthetic construct
  source 1..216: note = FcKO Heterodimeric Fc Backbone 5 monomer 1 (-)
APPVAGPSVFLFPPKPKDTLMISRTPEVTCVVVDVKHEDPEVKFNWYVDGVEVHNAKTKPREEEYNSTYRVVSVLTVLHQDWLNGKEYKCKVSNKALPAPIEKTISKAKGQPREPQVYTLPPSRDELTKNQVSLTCDVSGFYPSDIAVEWESDGQPENNYKTTPPVLDSDGSFFLYSKLTVDKSRWEQGDVFSCSVMHEALHNHYTQKSLSLSPGK

SEQ ID NO: 1913 - protein, 216 aa, synthetic construct
  source 1..216: note = FcKO Heterodimeric Fc Backbone 5 monomer 2 (+)
APPVAGPSVFLFPPKPKDTLMISRTPEVTCVVVDVKHEDPEVKFNWYVDGVEVHNAKTKPREEQYNSTYRVVSVLTVLHQDWLNGKEYKCKVSNKALPAPIEKTISKAKGQPREPQVYTLPPSRDQLTKNQVKLTCLVKGFYPSDIAVEWESNGQPENNYKTTPPVLDSDGSFFLYSKLTVDKSRWQQGNVFSCSVMHEALHNHYTQKSLSLSPGK

SEQ ID NO: 1914 - protein, 216 aa, synthetic construct
  source 1..216: note = FcKO Heterodimeric Fc Backbone 6 monomer 1 (-)
APPVAGPSVFLFPPKPKDTLMISRTPEVTCVVVDVKHEDPEVKFNWYVDGVEVHNAKTKPREEEYASTYRVVSVLTVLHQDWLNGKEYKCKVSNKALPAPIEKTISKAKGQPREPQVYTLPPSREEMTKNQVSLTCDVSGFYPSDIAVEWESDGQPENNYKTTPPVLDSDGSFFLYSKLTVDKSRWEQGDVFSCSVMHEALHNHYTQKSLSLSPGK

SEQ ID NO: 1915 - protein, 216 aa, synthetic construct
  source 1..216: note = FcKO Heterodimeric Fc Backbone 6 monomer 2 (+)
APPVAGPSVFLFPPKPKDTLMISRTPEVTCVVVDVKHEDPEVKFNWYVDGVEVHNAKTKPREEQYASTYRVVSVLTVLHQDWLNGKEYKCKVSNKALPAPIEKTISKAKGQPREPQVYTLPPSREQMTKNQVKLTCLVKGFYPSDIAVEWESNGQPENNYKTTPPVLDSDGSFFLYSKLTVDKSRWQQGNVFSCSVMHEALHNHYTQKSLSLSPGK

SEQ ID NO: 1916 - protein, 216 aa, synthetic construct
  source 1..216: note = FcKO Heterodimeric Fc Backbone 7 monomer 1 (-)
APPVAGPSVFLFPPKPKDTLMISRTPEVTCVVVDVKHEDPEVKFNWYVDGVEVHNAKTKPREEEYSSTYRVVSVLTVLHQDWLNGKEYKCKVSNKALPAPIEKTISKAKGQPREPQVYTLPPSREEMTKNQVSLTCDVSGFYPSDIAVEWESDGQPENNYKTTPPVLDSDGSFFLYSKLTVDKSRWEQGDVFSCSVMHEALHNHYTQKSLSLSPGK

SEQ ID NO: 1917 - protein, 216 aa, synthetic construct
  source 1..216: note = FcKO Heterodimeric Fc Backbone 7 monomer 2 (+)
APPVAGPSVFLFPPKPKDTLMISRTPEVTCVVVDVKHEDPEVKFNWYVDGVEVHNAKTKPREEQYSSTYRVVSVLTVLHQDWLNGKEYKCKVSNKALPAPIEKTISKAKGQPREPQVYTLPPSREQMTKNQVKLTCLVKGFYPSDIAVEWESNGQPENNYKTTPPVLDSDGSFFLYSKLTVDKSRWQQGNVFSCSVMHEALHNHYTQKSLSLSPGK

SEQ ID NO: 1918 - protein, 217 aa, synthetic construct
  source 1..217: note = FcKO Heterodimeric Fc Backbone 8 monomer 1 (-)
APEFLGGPSVFLFPPKPKDTLMISRTPEVTCVVVDVSQEDPEVQFNWYVDGVEVHNAKTKPREEEFNSTYRVVSVLTVLHQDWLNGKEYKCKVSNKGLPSSIEKTISKAKGQPREPQVYTLPPSQEEMTKNQVSLTCDVSGFYPSDIAVEWESDGQPENNYKTTPPVLDSDGSFFLYSRLTVDKSRWEEGDVFSCSVMHEALHNHYTQKSLSLSLGK

SEQ ID NO: 1919 - protein, 217 aa, synthetic construct
  source 1..217: note = FcKO Heterodimeric Fc Backbone 8 monomer 2 (+)
APEFLGGPSVFLFPPKPKDTLMISRTPEVTCVVVDVSQEDPEVQFNWYVDGVEVHNAKTKPREEQFNSTYRVVSVLTVLHQDWLNGKEYKCKVSNKGLPSSIEKTISKAKGQPREPQVYTLPPSQEQMTKNQVKLTCLVKGFYPSDIAVEWESNGQPENNYKTTPPVLDSDGSFFLYSRLTVDKSRWQEGNVFSCSVMHEALHNHYTQKSLSLSLGK

SEQ ID NO: 1920 - protein, 216 aa, synthetic construct
  source 1..216: note = FcKO Heterodimeric Fc Backbone 9 monomer 1 (-)
APPVAGPSVFLFPPKPKDTLMISRTPEVTCVVVDVSHEDPEVQFNWYVDGVEVHNAKTKPREEEFNSTFRVVSVLTVVHQDWLNGKEYKCKVSNKGLPAPIEKTISKTKGQPREPQVYTLPPSREEMTKNQVSLTCDVSGFYPSDIAVEWESDGQPENNYKTTPPMLDSDGSFFLYSKLTVDKSRWEQGDVFSCSVMHEALHNHYTQKSLSLSPGK

SEQ ID NO: 1921 - protein, 216 aa, synthetic construct
  source 1..216: note = FcKO Heterodimeric Fc Backbone 9 monomer 2 (+)
APPVAGPSVFLFPPKPKDTLMISRTPEVTCVVVDVSHEDPEVQFNWYVDGVEVHNAKTKPREEQFNSTFRVVSVLTVVHQDWLNGKEYKCKVSNKGLPAPIEKTISKTKGQPREPQVYTLPPSREQMTKNQVKLTCLVKGFYPSDIAVEWESNGQPENNYKTTPPMLDSDGSFFLYSKLTVDKSRWQQGNVFSCSVMHEALHNHYTQKSLSLSPGK

SEQ ID NO: 1922 - protein, 216 aa, synthetic construct
  source 1..216: note = FcKO Heterodimeric Fc Backbone 10 monomer 1 (-)
APPVAGPSVFLFPPKPKDTLMISRTPEVTCVVVDVKHEDPEVQFNWYVDGVEVHNAKTKPREEEFNSTFRVVSVLTVVHQDWLNGKEYKCKVSNKGLPAPIEKTISKTKGQPREPQVYTLPPSREEMTKNQVSLTCDVSGFYPSDIAVEWESDGQPENNYKTTPPMLDSDGSFFLYSKLTVDKSRWEQGDVFSCSVMHEALHNHYTQKSLSLSPGK

SEQ ID NO: 1923 - protein, 216 aa, synthetic construct
  source 1..216: note = FcKO Heterodimeric Fc Backbone 10 monomer 2 (+)
APPVAGPSVFLFPPKPKDTLMISRTPEVTCVVVDVKHEDPEVQFNWYVDGVEVHNAKTKPREEQFNSTFRVVSVLTVVHQDWLNGKEYKCKVSNKGLPAPIEKTISKTKGQPREPQVYTLPPSREQMTKNQVKLTCLVKGFYPSDIAVEWESNGQPENNYKTTPPMLDSDGSFFLYSKLTVDKSRWQQGNVFSCSVMHEALHNHYTQKSLSLSPGK

SEQ ID NO: 1924 - protein, 216 aa, synthetic construct
  source 1..216: note = FcKO Heterodimeric Fc Backbone 11 monomer 1 (-)
APPVAGPSVFLFPPKPKDTLMISRTPEVTCVVVDVKHEDPEVKFNWYVDGVEVHNAKTKPREEEYNSTYRVVSVLTVLHQDWLNGKEYKCKVSNKALPAPIEKTISKAKGQPREPQVYTLPPSREEMTKNQVSLTCDVSGFYPSDIAVEWESDGQPENNYKTTPPVLDSDGSFFLYSKLTVDKSRWEQGDVFSCSVLHEALHSHYTQKSLSLSPGK

SEQ ID NO: 1925 - protein, 216 aa, synthetic construct
  source 1..216: note = FcKO Heterodimeric Fc Backbone 11 monomer 2 (+)
APPVAGPSVFLFPPKPKDTLMISRTPEVTCVVVDVKHEDPEVKFNWYVDGVEVHNAKTKPREEQYNSTYRVVSVLTVLHQDWLNGKEYKCKVSNKALPAPIEKTISKAKGQPREPQVYTLPPSREQMTKNQVKLTCLVKGFYPSDIAVEWESNGQPENNYKTTPPVLDSDGSFFLYSKLTVDKSRWQQGNVFSCSVLHEALHSHYTQKSLSLSPGK

SEQ ID NO: 1926 - protein, 216 aa, synthetic construct
  source 1..216: note = FcKO Heterodimeric Fc Backbone 12 monomer 1 (-)
APPVAGPSVFLFPPKPKDTLMISRTPEVTCVVVDVKHEDPEVKFKWYVDGVEVHNAKTKPREEQYNSTYRVVSVLTVLHQDWLNGKEYKCKVSNKALPAPIEKTISKAKGQPREPQVYTLPPSREQMTKNQVKLTCLVKGFYPSDIAVEWESNGQPENNYKTTPPVLDSDGSFFLYSKLTVDKSRWQQGNVFSCSVMHEALHNHYTQKSLSLSPGK

SEQ ID NO: 1927 - protein, 216 aa, synthetic construct; identical to SEQ ID NO: 1904
  source 1..216: note = FcKO Heterodimeric Fc Backbone 12 monomer 2 (+)

SEQ ID NO: 1928 - protein, 216 aa, synthetic construct
  source 1..216: note = FcKO Heterodimeric Fc Backbone 13 monomer 1 (-)
APPVAGPSVFLFPPKPKDTLMISRTPEVTCVVVDVKHEDPEVKFNWYVDGVEVHNAKTKPREEEYNSTYRVVSVLTVLHQDWLNGKEYKCKVSNKALPAPIEKTISKAKGQPREPQVYTLPPSRDELTKNQVSLTCDVSGFYPSDIAVEWESDGQPENNYKTTPPVLDSDGSFFLYSKLTVDKSRWEQGDVFSCSVLHEALHSHYTQKSLSLSPGK

SEQ ID NO: 1929 - protein, 216 aa, synthetic construct
  source 1..216: note = FcKO Heterodimeric Fc Backbone 13 monomer 2 (+)
APPVAGPSVFLFPPKPKDTLMISRTPEVTCVVVDVKHEDPEVKFNWYVDGVEVHNAKTKPREEQYNSTYRVVSVLTVLHQDWLNGKEYKCKVSNKALPAPIEKTISKAKGQPREPQVYTLPPSRDQLTKNQVKLTCLVKGFYPSDIAVEWESNGQPENNYKTTPPVLDSDGSFFLYSKLTVDKSRWQQGNVFSCSVLHEALHSHYTQKSLSLSPGK

SEQ ID NO: 1930 - protein, 216 aa, synthetic construct
  source 1..216: note = FcKO Heterodimeric Fc Backbone 14 monomer 1 (-)
APPVAGPSVFLFPPKPKDTLMISRTPEVTCVVVDVKHEDPEVKFNWYVDGVEVHNAKTKPREEEYNSTYRVVSVLTVLHQDWLNGKEYKCKVSNKALPAPIEKTISKAKGQPREPQVYTLPPSREEMTKNQVSLTCDVSGFYPSDIAVEWESDGQPENNYKTTPPVLDSDGSFFLYSKLTVDKSRWEQGDVFSCSVLHEALHAHYTQKSLSLSPGK

SEQ ID NO: 1931 - protein, 216 aa, synthetic construct
  source 1..216: note = FcKO Heterodimeric Fc Backbone 14 monomer 2 (+)
APPVAGPSVFLFPPKPKDTLMISRTPEVTCVVVDVKHEDPEVKFNWYVDGVEVHNAKTKPREEQYNSTYRVVSVLTVLHQDWLNGKEYKCKVSNKALPAPIEKTISKAKGQPREPQVYTLPPSREQMTKNQVKLTCLVKGFYPSDIAVEWESNGQPENNYKTTPPVLDSDGSFFLYSKLTVDKSRWQQGNVFSCSVLHEALHAHYTQKSLSLSPGK

SEQ ID NO: 1932 - protein, 216 aa, synthetic construct
  source 1..216: note = FcKO Heterodimeric Fc Backbone 15 monomer 1 (-)
APPVAGPSVFLFPPKPKDTLMISRTPEVTCVVVDVKHEDPEVKFNWYVDGVEVHNAKTKPREEEYNSTYRVVSVLTVLHQDWLNGKEYKCKVSNKALPAPIEKTISKAKGQPREPQVYTLPPSRDELTKNQVSLTCDVSGFYPSDIAVEWESDGQPENNYKTTPPVLDSDGSFFLYSKLTVDKSRWEQGDVFSCSVLHEALHAHYTQKSLSLSPGK

SEQ ID NO: 1933 - protein, 216 aa, synthetic construct
  source 1..216: note = FcKO Heterodimeric Fc Backbone 15 monomer 2 (+)
APPVAGPSVFLFPPKPKDTLMISRTPEVTCVVVDVKHEDPEVKFNWYVDGVEVHNAKTKPREEQYNSTYRVVSVLTVLHQDWLNGKEYKCKVSNKALPAPIEKTISKAKGQPREPQVYTLPPSRDQLTKNQVKLTCLVKGFYPSDIAVEWESNGQPENNYKTTPPVLDSDGSFFLYSKLTVDKSRWQQGNVFSCSVLHEALHAHYTQKSLSLSPGK

SEQ ID NO: 1934 - protein, 329 aa, synthetic construct; identical to SEQ ID NO: 1880
  source 1..329: note = 2 + 1 Fab2-scFv-Fc Backbone 1_Fab-Fc Side

SEQ ID NO: 1935 - protein, 216 aa, synthetic construct; identical to SEQ ID NO: 1905
  source 1..216: note = 2 + 1 Fab2-scFv-Fc Backbone 1_Fab-scFv-Fc Side

SEQ ID NO: 1936 - protein, 329 aa, synthetic construct; identical to SEQ ID NO: 1880
  source 1..329: note = 2 + 1 Fab2-scFv-Fc Backbone 2_Fab-Fc Side

SEQ ID NO: 1937 - protein, 216 aa, synthetic construct; identical to SEQ ID NO: 1907
  source 1..216: note = 2 + 1 Fab2-scFv-Fc Backbone 2_Fab-scFv-Fc Side

SEQ ID NO: 1938 - protein, 329 aa, synthetic construct; identical to SEQ ID NO: 1884
  source 1..329: note = 2 + 1 Fab2-scFv-Fc Backbone 3_Fab-Fc Side

SEQ ID NO: 1939 - protein, 216 aa, synthetic construct; identical to SEQ ID NO: 1907
  source 1..216: note = 2 + 1 Fab2-scFv-Fc Backbone 3_Fab-scFv-Fc Side

SEQ ID NO: 1940 - protein, 329 aa, synthetic construct; identical to SEQ ID NO: 1886
  source 1..329: note = 2 + 1 Fab2-scFv-Fc Backbone 4_Fab-Fc Side

SEQ ID NO: 1941 - protein, 216 aa, synthetic construct; identical to SEQ ID NO: 1911
  source 1..216: note = 2 + 1 Fab2-scFv-Fc Backbone 4_Fab-scFv-Fc Side

SEQ ID NO: 1942 - protein, 329 aa, synthetic construct; identical to SEQ ID NO: 1888
  source 1..329: note = 2 + 1 Fab2-scFv-Fc Backbone 5_Fab-Fc Side

SEQ ID NO: 1943 - protein, 216 aa, synthetic construct; identical to SEQ ID NO: 1913
  source 1..216: note = 2 + 1 Fab2-scFv-Fc Backbone 5_Fab-scFv-Fc Side

SEQ ID NO: 1944 - protein, 329 aa, synthetic construct; identical to SEQ ID NO: 1890
  source 1..329: note = 2 + 1 Fab2-scFv-Fc Backbone 6_Fab-Fc Side

SEQ ID NO: 1945 - protein, 216 aa, synthetic construct; identical to SEQ ID NO: 1915
  source 1..216: note = 2 + 1 Fab2-scFv-Fc Backbone 6_Fab-scFv-Fc Side

SEQ ID NO: 1946 - protein, 329 aa, synthetic construct; identical to SEQ ID NO: 1892
  source 1..329: note = 2 + 1 Fab2-scFv-Fc Backbone 7_Fab-Fc Side

SEQ ID NO: 1947 - protein, 216 aa, synthetic construct; identical to SEQ ID NO: 1917
  source 1..216: note = 2 + 1 Fab2-scFv-Fc Backbone 7_Fab-scFv-Fc Side

SEQ ID NO: 1948 - protein, 329 aa, synthetic construct; identical to SEQ ID NO: 1900
  source 1..329: note = 2 + 1 Fab2-scFv-Fc Backbone 8_Fab-Fc Side

SEQ ID NO: 1949 - protein, 216 aa, synthetic construct; identical to SEQ ID NO: 1925
  source 1..216: note = 2 + 1 Fab2-scFv-Fc Backbone 8_Fab-scFv-Fc Side

SEQ ID NO: 1950 - protein, 329 aa, synthetic construct; identical to SEQ ID NO: 1902
  source 1..329: note = 2 + 1 Fab2-scFv-Fc Backbone 9_Fab-Fc Side

SEQ ID NO: 1951 - protein, 216 aa, synthetic construct; identical to SEQ ID NO: 1926
  source 1..216: note = 2 + 1 Fab2-scFv-Fc Backbone 9_Fab-scFv-Fc Side

SEQ ID NO: 1952 - protein, 113 aa, synthetic construct
  source 1..113: note = IgG1 CH1(+) + hinge
ASTKGPSVFPLAPSSKSTSGGTAALGCLVKDYFPEPVTVSWNSGALTSGVHTFPAVLQSSGLYSLSSVVTVPSSSLGTQTYICNVNHKPSNTKVDKKVEPKSCDKTHTCPPCP

SEQ ID NO: 1953 - protein, 113 aa, synthetic construct
  source 1..113: note = IgG1 CH1(-) + hinge
ASTKGPSVFPLAPSSKSTSGGTAALGCLVKDYFPEPVTVSWNSGALTSGVHTFPAVLQSSGLYSLSSVVTVPSSSLGTQTYICNVNHKPSDTKVDKKVEPKSCDKTHTCPPCP

SEQ ID NO: 1954 - protein, 110 aa, synthetic construct
  source 1..110: note = IgG2 CH1(+) + hinge
ASTKGPSVFPLAPCSRSTSESTAALGCLVKDYFPEPVTVSWNSGALTSGVHTFPAVLQSSGLYSLSSVVTVPSSNFGTQTYTCNVDHKPSNTKVDKTVERKCCVECPPCP

SEQ ID NO: 1955 - protein, 110 aa, synthetic construct
  source 1..110: note = IgG2 CH1(-) + hinge
ASTKGPSVFPLAPCSRSTSESTAALGCLVKDYFPEPVTVSWNSGALTSGVHTFPAVLQSSGLYSLSSVVTVPSSNFGTQTYTCNVDHKPSDTKVDKTVERKCCVECPPCP

SEQ ID NO: 1956 - protein, 110 aa, synthetic construct
  source 1..110: note = IgG4 CH1(+) + hinge
ASTKGPSVFPLAPCSRSTSESTAALGCLVKDYFPEPVTVSWNSGALTSGVHTFPAVLQSSGLYSLSSVVTVPSSSLGTKTYTCNVDHKPSNTKVDKRVESKYGPPCPSCP

SEQ ID NO: 1957 - protein, 110 aa, synthetic construct
  source 1..110: note = IgG4 CH1(-) + hinge
ASTKGPSVFPLAPCSRSTSESTAALGCLVKDYFPEPVTVSWNSGALTSGVHTFPAVLQSSGLYSLSSVVTVPSSSLGTKTYTCNVDHKPSDTKVDKRVESKYGPPCPSCP

SEQ ID NO: 1958 - protein, 103 aa, synthetic construct
  source 1..103: note = IgG1 CH1(+) + half hinge
ASTKGPSVFPLAPSSKSTSGGTAALGCLVKDYFPEPVTVSWNSGALTSGVHTFPAVLQSSGLYSLSSVVTVPSSSLGTQTYICNVNHKPSNTKVDKKVEPKSC

SEQ ID NO: 1959 - protein, 103 aa, synthetic construct
  source 1..103: note = IgG1 CH1(-) + half hinge
ASTKGPSVFPLAPSSKSTSGGTAALGCLVKDYFPEPVTVSWNSGALTSGVHTFPAVLQSSGLYSLSSVVTVPSSSLGTQTYICNVNHKPSDTKVDKKVEPKSC

SEQ ID NO: 1960 - protein, 98 aa, synthetic construct
  source 1..98: note = IgG1 CH1(+)
ASTKGPSVFPLAPSSKSTSGGTAALGCLVKDYFPEPVTVSWNSGALTSGVHTFPAVLQSSGLYSLSSVVTVPSSSLGTQTYICNVNHKPSNTKVDKKV

SEQ ID NO: 1961 - protein, 98 aa, synthetic construct
  source 1..98: note = IgG1 CH1(-)
ASTKGPSVFPLAPSSKSTSGGTAALGCLVKDYFPEPVTVSWNSGALTSGVHTFPAVLQSSGLYSLSSVVTVPSSSLGTQTYICNVNHKPSDTKVDKKV

SEQ ID NO: 1962 - protein, 98 aa, synthetic construct
  source 1..98: note = IgG2 CH1(+)
ASTKGPSVFPLAPCSRSTSESTAALGCLVKDYFPEPVTVSWNSGALTSGVHTFPAVLQSSGLYSLSSVVTVPSSNFGTQTYTCNVDHKPSNTKVDKTV

SEQ ID NO: 1963 - protein, 98 aa, synthetic construct
  source 1..98: note = IgG2 CH1(-)
ASTKGPSVFPLAPCSRSTSESTAALGCLVKDYFPEPVTVSWNSGALTSGVHTFPAVLQSSGLYSLSSVVTVPSSNFGTQTYTCNVDHKPSDTKVDKTV

SEQ ID NO: 1964 - protein, 98 aa, synthetic construct
  source 1..98: note = IgG4 CH1(+)
ASTKGPSVFPLAPCSRSTSESTAALGCLVKDYFPEPVTVSWNSGALTSGVHTFPAVLQSSGLYSLSSVVTVPSSSLGTKTYTCNVDHKPSNTKVDKRV

SEQ ID NO: 1965 - protein, 98 aa, synthetic construct
  source 1..98: note = IgG4 CH1(-)
ASTKGPSVFPLAPCSRSTSESTAALGCLVKDYFPEPVTVSWNSGALTSGVHTFPAVLQSSGLYSLSSVVTVPSSSLGTKTYTCNVDHKPSDTKVDKRV

SEQ ID NO: 1966 - protein, 15 aa, synthetic construct
  source 1..15: note = IgG1 hinge
EPKSCDKTHTCPPCP

SEQ ID NO: 1967 - protein, 12 aa, synthetic construct
  source 1..12: note = IgG2 hinge
ERKCCVECPPCP

SEQ ID NO: 1968 - protein, 12 aa, synthetic construct
  source 1..12: note = IgG4 hinge
ESKYGPPCPSCP

SEQ ID NO: 1969 - protein, 107 aa, synthetic construct [sequence omitted]

SEQ ID NO: 1970 - protein, 106 aa, synthetic construct
  source 1..106: note = Light Chain Constant Domain - Lambda
GQPKAAPSVTLFPPSSEELQANKATLVCLISDFYPGAVTVAWKADSSPVKAGVETTTPSKQSNNKYAASSYLSLTPEQWKSHRSYSCQVTHEGSTVEKTVAPTECS

SEQ ID NO: 1971 - protein, 216 aa, synthetic construct; identical to SEQ ID NO: 1904
  source 1..216: note = 2 + 1 mAb-scFv Heterodimeric Fc Backbone monomer 1 (-)

SEQ ID NO: 1972 - protein, 215 aa, synthetic construct
  source 1..215: note = 2 + 1 mAb-scFv Heterodimeric Fc Backbone monomer 2 (+)
APPVAGPSVFLFPPKPKDTLMISRTPEVTCVVVDVKHEDPEVKFNWYVDGVEVHNAKTKPREEQYNSTYRVVSVLTVLHQDWLNGKEYKCKVSNKALPAPIEKTISKAKGQPREPQVYTLPPSREQMTKNQVKLTCLVKGFYPSDIAVEWESNGQPENNYKTTPPVLDSDGSFFLYSKLTVDKSRWQQGNVFSCSVMHEALHNHYTQKSLSLSPG

SEQ ID NO: 1973 - protein, 216 aa, synthetic construct; identical to SEQ ID NO: 1904
  source 1..216: note = 2 + 1 mAb-scFv Heterodimeric Fc Backbone FcKO monomer 1 (-)

SEQ ID NO: 1974 - protein, 215 aa, synthetic construct; identical to SEQ ID NO: 1972
  source 1..215: note = 2 + 1 mAb-scFv Heterodimeric Fc Backbone FcKO monomer 2 (+)

SEQ ID NO: 1975 - protein, 216 aa, synthetic construct
  source 1..216: note = Heterodimeric Fc Backbone 1 monomer 2 (+)
APELLGGPSVFLFPPKPKDTLMISRTPEVTCVVVDVSHEDPEVKFNWYVDGVEVHNAKTKPREEQYNSTYRVVSVLTVLHQDWLNGKEYKCKVSNKALPAPIEKTISKAKGQPREPQVYTLPPSREQMTKNQVKLTCLVKGFYPSDIAVEWESNGQPENNYKTTPPVLDSDGSFFLYSKLTVDKSRWQQGNVFSCSVMHEALHNHYTQKSLSLSPG

SEQ ID NO: 1976 - protein, 216 aa, synthetic construct
  source 1..216: note = S239D/I332E : S239D/I332E_ADCC-enhanced Heterodimeric Backbone 1 monomer 2 (+)
APELLGGPDVFLFPPKPKDTLMISRTPEVTCVVVDVSHEDPEVKFNWYVDGVEVHNAKTKPREEQYNSTYRVVSVLTVLHQDWLNGKEYKCKVSNKALPAPEEKTISKAKGQPREPQVYTLPPSREQMTKNQVKLTCLVKGFYPSDIAVEWESNGQPENNYKTTPPVLDSDGSFFLYSKLTVDKSRWQQGNVFSCSVMHEALHNHYTQKSLSLSPG

SEQ ID NO: 1977 - protein, 216 aa, synthetic construct
  source 1..216: note = S239D : S239D_ADCC-enhanced Heterodimeric Backbone 2 monomer 2 (+)
APELLGGPDVFLFPPKPKDTLMISRTPEVTCVVVDVSHEDPEVKFNWYVDGVEVHNAKTKPREEQYNSTYRVVSVLTVLHQDWLNGKEYKCKVSNKALPAPIEKTISKAKGQPREPQVYTLPPSREQMTKNQVKLTCLVKGFYPSDIAVEWESNGQPENNYKTTPPVLDSDGSFFLYSKLTVDKSRWQQGNVFSCSVMHEALHNHYTQKSLSLSPG

SEQ ID NO: 1978 - protein, 216 aa, synthetic construct
  source 1..216: note = I332E : I332E_ADCC-enhanced Heterodimeric Backbone 3 monomer 2 (+)
APELLGGPSVFLFPPKPKDTLMISRTPEVTCVVVDVSHEDPEVKFNWYVDGVEVHNAKTKPREEQYNSTYRVVSVLTVLHQDWLNGKEYKCKVSNKALPAPEEKTISKAKGQPREPQVYTLPPSREQMTKNQVKLTCLVKGFYPSDIAVEWESNGQPENNYKTTPPVLDSDGSFFLYSKLTVDKSRWQQGNVFSCSVMHEALHNHYTQKSLSLSPG

SEQ ID NO: 1979 - protein, 216 aa, synthetic construct; identical to SEQ ID NO: 1976
  source 1..216: note = WT : S239D/I332E_ADCC-enhanced Heterodimeric Backbone 4 monomer 2 (+)

SEQ ID NO: 1980 - protein, 216 aa, synthetic construct; identical to SEQ ID NO: 1977
  source 1..216: note = WT : S239D_ADCC-enhanced Heterodimeric Backbone 5 monomer 2 (+)

SEQ ID NO: 1981 - protein, 216 aa, synthetic construct; identical to SEQ ID NO: 1978
  source 1..216: note = WT : I332E_ADCC-enhanced Heterodimeric Backbone 6 monomer 2 (+)

SEQ ID NO: 1982 - protein, 216 aa, synthetic construct; identical to SEQ ID NO: 1975
  source 1..216: note = S239D/I332E : WT_ADCC-enhanced Heterodimeric Backbone 7 monomer 2 (+)

SEQ ID NO: 1983 - protein, 216 aa, synthetic construct; identical to SEQ ID NO: 1975
  source 1..216: note = S239D : WT_ADCC-enhanced Heterodimeric Backbone 8 monomer 2 (+)

SEQ ID NO: 1984 - protein, 216 aa, synthetic construct; identical to SEQ ID NO: 1975
  source 1..216: note = I332E : WT_ADCC-enhanced Heterodimeric Backbone 9 monomer 2 (+)

SEQ ID NO: 1985 - protein, 216 aa, synthetic construct; identical to SEQ ID NO: 1977
  source 1..216: note = S239D/I332E : S239D_ADCC-enhanced Heterodimeric Backbone 10 monomer 2 (+)

SEQ ID NO: 1986 - protein, 216 aa, synthetic construct; identical to SEQ ID NO: 1978
  source 1..216: note = S239D/I332E : I332E_ADCC-enhanced Heterodimeric Backbone 11 monomer 2 (+)

SEQ ID NO: 1987 - protein, 216 aa, synthetic construct; identical to SEQ ID NO: 1976
  source 1..216: note = S239D : S239D/I332E_ADCC-enhanced Heterodimeric Backbone 12 monomer 2 (+)

SEQ ID NO: 1988 - protein, 216 aa, synthetic construct; identical to SEQ ID NO: 1976
  source 1..216: note = I332E : S239D/I332E_ADCC-enhanced Heterodimeric Backbone 13 monomer 2 (+)

SEQ ID NO: 1989 - protein, 216 aa, synthetic construct; identical to SEQ ID NO: 1978
  source 1..216: note = S239D : I332E_ADCC-enhanced Heterodimeric Backbone 14 monomer 2 (+)

SEQ ID NO: 1990 - protein, 216 aa, synthetic construct; identical to SEQ ID NO: 1977
  source 1..216: note = I332E : S239D_ADCC-enhanced Heterodimeric Backbone 15 monomer 2 (+)

SEQ ID NO: 1991 - protein, 216 aa, synthetic construct
  source 1..216: note = S239D/I332E : S239D/I332E_ADCC-enhanced Heterodimeric Backbone 1 w/ Xtend monomer 2 (+)
APELLGGPDVFLFPPKPKDTLMISRTPEVTCVVVDVSHEDPEVKFNWYVDGVEVHNAKTKPREEQYNSTYRVVSVLTVLHQDWLNGKEYKCKVSNKALPAPEEKTISKAKGQPREPQVYTLPPSREQMTKNQVKLTCLVKGFYPSDIAVEWESNGQPENNYKTTPPVLDSDGSFFLYSKLTVDKSRWQQGNVFSCSVLHEALHSHYTQKSLSLSPG

SEQ ID NO: 1992 - protein, 216 aa, synthetic construct; identical to SEQ ID NO: 80
  source 1..216: note = S239D : S239D_ADCC-enhanced Heterodimeric Backbone 2 w/ Xtend monomer 2 (+)

SEQ ID NO: 1993 - protein, 216 aa, synthetic construct; identical to SEQ ID NO: 93
  source 1..216: note = I332E : I332E_ADCC-enhanced Heterodimeric Backbone 3 w/ Xtend monomer 2 (+)

SEQ ID NO: 1994 - protein, 216 aa, synthetic construct; identical to SEQ ID NO: 1991
  source 1..216: note = WT : S239D/I332E_ADCC-enhanced Heterodimeric Backbone 4 w/ Xtend monomer 2 (+)

SEQ ID NO: 1995 - protein, 216 aa, synthetic construct; identical to SEQ ID NO: 80
  source 1..216: note = WT : S239D_ADCC-enhanced Heterodimeric Backbone 5 w/ Xtend monomer 2 (+)

SEQ ID NO: 1996 - protein, 216 aa, synthetic construct; identical to SEQ ID NO: 93
  source 1..216: note = WT : I332E_ADCC-enhanced Heterodimeric Backbone 6 w/ Xtend monomer 2 (+)

SEQ ID NO: 1997 - protein, 216 aa, synthetic construct
  source 1..216: note = S239D/I332E : WT_ADCC-enhanced Heterodimeric Backbone 7 w/ Xtend monomer 2 (+)
APELLGGPSVFLFPPKPKDTLMISRTPEVTCVVVDVSHEDPEVKFNWYVDGVEVHNAKTKPREEQYNSTYRVVSVLTVLHQDWLNGKEYKCKVSNKALPAPIEKTISKAKGQPREPQVYTLPPSREQMTKNQVKLTCLVKGFYPSDIAVEWESNGQPENNYKTTPPVLDSDGSFFLYSKLTVDKSRWQQGNVFSCSVLHEALHSHYTQKSLSLSPG

SEQ ID NO: 1998 - protein, 216 aa, synthetic construct; identical to SEQ ID NO: 1997
  source 1..216: note = S239D : WT_ADCC-enhanced Heterodimeric Backbone 8 w/ Xtend monomer 2 (+)

SEQ ID NO: 1999 - protein, 216 aa, synthetic construct; identical to SEQ ID NO: 1997
  source 1..216: note = I332E : WT_ADCC-enhanced Heterodimeric Backbone 9 w/ Xtend monomer 2 (+)

SEQ ID NO: 2000 - protein, 216 aa, synthetic construct; identical to SEQ ID NO: 80
  source 1..216: note = S239D/I332E : S239D_ADCC-enhanced Heterodimeric Backbone 10 w/ Xtend monomer 2 (+)

SEQ ID NO: 2001 - protein, 216 aa, synthetic construct; identical to SEQ ID NO: 93
  source 1..216: note = S239D/I332E : I332E_ADCC-enhanced Heterodimeric Backbone 11 w/ Xtend monomer 2 (+)

SEQ ID NO: 2002 - protein, 216 aa, synthetic construct; identical to SEQ ID NO: 1991
  source 1..216: note = S239D : S239D/I332E_ADCC-enhanced Heterodimeric Backbone 12 w/ Xtend monomer 2 (+)

SEQ ID NO: 2003 - protein, 216 aa, synthetic construct; identical to SEQ ID NO: 1991
  source 1..216: note = I332E : S239D/I332E_ADCC-enhanced Heterodimeric Backbone 13 w/ Xtend monomer 2 (+)

SEQ ID NO: 2004 - protein, 107 aa, synthetic construct; identical to SEQ ID NO: 962
  source 1..107: note = P1AE4979_vl

SEQ ID NO: 2005 - protein, 5 aa, synthetic construct
  source 1..5: note = 1D7B4[NKG2D]_H1.30_vhCDR1
SYAMS

SEQ ID NO: 2006 - protein, 17 aa, synthetic construct
  source 1..17: note = 1D7B4[NKG2D]_H1.31_vhCDR2
SISASGGSTYYADSVKG

1. An antibody comprising:
a) means for binding the extracellular domain of human NKG2D; and
b) a variant IgG1 Fc dimeric domain comprising an amino acid substitution as compared to human IgG1, wherein the variant that has increased in vitro binding to the human FcγRIIIa receptor as compared to human IgG1.

2. An antibody comprising:
a) means for binding the extracellular domain of human NKp46; and
b) a variant IgG1 Fc domain comprising an amino acid substitution as compared to human IgG1, wherein the variant that has increased in vitro binding to the human FcγRIIIa receptor as compared to human IgG1.

3. An antibody comprising:
a) means for binding the extracellular domain of human NKp30; and
b) a variant IgG1 Fc domain comprising an amino acid substitution as compared to human IgG1, wherein the variant that has increased in vitro binding to the human FcγRIIIa receptor as compared to human IgG1.

4. The antibody according to claim 1, wherein the variant IgG1 Fc domain comprises an amino acid substitution selected from the group consisting of: S239D, S239E, I332D, I332E, S239D/I332E, S239D/I332D, S239E/I332D and S239E/I332E.

5. (canceled)

6. (canceled)

7. The antibody according to claim 1, wherein the variant IgG1 Fc domain comprises an amino acid substitution selected from the group consisting of: S239D, S239E, I332D, I332E, S239D/I332E, S239E/I332E, S239D/I332D, S239E/I332D, S239D/A330L/I332E, S239D/A330L, A330L/I332E, F243L, F243L/R292P/Y300L/V305I/P396L, 332I/P247I/A339Q, S298A/E333A/K334A, V264I/I332E, S298A, S298A/I332E, S298A/E333A/K334A, S239Q/I332E, D265G, Y296Q, S298T, L328I/I332E, V264T, V266I, S239D/I332N, S239E/I332N, S239E/I332Q, S239N/I332E, S239Q/I332D, K326E, A330Y/I332E, V264I/A330Y/I332E, A330L/I332E, V264I/A330L/I332E, L234D, L234E, L234I, L235D, L235T, A330F, L328V/I332E, S239Q/V264I/I332E, S239E/V264I/A330Y/I332E, K274R, N276Y, S324T, K334I, K334F, L234I/L235D, L235D/S239D/A330Y/I332E, S239D/V240I/A330Y/I332E, S239D/V264T/A330Y/I332E, S239D/K326E/A330Y/I332E, S239D/K326T/A330Y/I332E, E293R, S324G, E272R, P227G, G236S, D221K, H224E, K246H, D249Y, R255Y, E258H, T260H, G281D, E283H, E283L, V284E, S239D/E272I/I332E, S239D/E272Y/A330L/I332E, S239D/E272I/A330L/I332E, S239D/K274E/I332E, S239D/K326T/I332E, S239D/K326E/I332E and S239D/K274E/A330L/I332E.

8. The antibody according to claim 1, wherein the antibody further comprises means for binding a human tumor antigen selected from the group consisting of: EGFR, Trop2, CD20, B7H3, FLT3, DLL3, CD19, CD22, CD38, CEA, MSLN, BCMA, CAIX, ANO1, CD19, CD123, HER2 and CLDN18.2.

9. A heterodimeric antibody comprising:
a) means for binding the extracellular domain of human NKG2D;
b) means for binding the extracellular domain of a tumor antigen selected from the group consisting of: EGFR, Trop2, CD20, B7H3, FLT3, DLL3, CD19, CEA, MSLN, BCMA, CAIX, ANO1, CD19, CD123, CD22, CD38, HER2 and CLDN18.2; and
c) a variant IgG1 dimeric Fc domain comprising an amino acid substitution as compared to human IgG1 wherein the variant that has increased in vitro binding to the human FcγRIIIa receptor as compared to human IgG1.

10. The heterodimeric antibody according to claim 9, wherein the variant IgG1 dimeric Fc domain comprises two monomeric Fc domains, wherein one of the monomeric Fc domains comprises an amino acid substitution(s) selected from the group consisting of: S239D, S239E, I332D, I332E, S239D/I332E, S239E/I332E, S239D/I332D, S239E/I332D, S239D/330L/I332E, 239D/330L, 330L/332E, 243L, F243L/R292P/Y300L/V305I/P396L, 332I/247I/339Q, S298A/E333A/K334A, V264I/I332E, S298A, S298A/I332E, S298A/E333A.K334A, S239Q/I332E, D265G, Y296Q, S298T, L328I/I332E, V264T, V266I, S239D/I332N, S239E/I332N, S239E/I332Q, S239N/I332E, S239Q/I332D, K326E, A330Y/I332E, V264I/A330Y/I332E, A330L/I332E, V264I/A330L/I332E, L234D, L234E, L234I, L235D, L235T, A330F, L328V/I332E, S239Q/V264I/I332E, S239E/V264I/A330Y/I332E, K274R, N276Y, S324T, K334I, K334F, L234I/L235D, L235D/S239D/A330Y/I332E, S239D/V240I/A330Y/I332E, S239D/V264T/A330Y/I332E, S239D/K326E/A330Y/I332E, S239D/K326T/A330Y/I332E, 3293R, S324G, E272R, P227G, G236S, D221K, H224E, K246H, D249Y, R255Y, E258H, T260H, G281D, E283H, E283L, V284E, S239D/3272I/I332E, S239D/E272Y/A330L/I332E, S239D/E272I/A330L/I332E, S239D/K274E/I332E, S239D/K326T/I332E, S239D/K326E/I332E AND S239D/K274E/A330L/I332E.

11. The heterodimeric antibody according to claim 10, wherein both of the monomeric Fc domains comprises the amino acid substitution(s).

12. The heterodimeric antibody according to claim 10, wherein one of the monomeric Fc domains comprises an amino acid substitution selected from the group consisting of: S239D, S239E, S239D/I332E, I332E, and 1332D.

13. A heterodimeric antibody comprising:
a) means for binding the extracellular domain of human NKp46;
b) means for binding the extracellular domain of a tumor antigen selected from the group consisting of: EGFR, Trop2, CD20, B7H3, FLT3, DLL3, CD19, CEA, MSLN, BCMA, CAIX, ANO1, CD19, CD123, CD22, CD38, HER2 and CLDN18.2; and
c) a variant IgG1 dimeric Fc domain comprising an amino acid substitution as compared to human IgG1 wherein the variant that has increased in vitro binding to the human FcγRIIIa receptor as compared to human IgG1.

14. (canceled)

15. (canceled)

16. (canceled)

17. A heterodimeric antibody comprising:
a) means for binding the extracellular domain of human NKp30;
b) means for binding the extracellular domain of a tumor antigen selected from the group consisting of: EGFR, Trop2, CD20, B7H3, FLT3, DLL3, CD19, CEA, MSLN, BCMA, CAIX, ANO1, CD19, CD123, CD22, CD38, HER2 and CLDN18.2; and
c) a variant IgG1 dimeric Fc domain comprising an amino acid substitution as compared to human IgG1 wherein the variant that has increased in vitro binding to the human FcγRIIIa receptor as compared to human IgG1.

18. (canceled)

19. (canceled)

20. (canceled)

21. An antibody comprising:
a) an antigen binding domain (ABD) that binds the extracellular domain of human NKG2D; and
b) a variant IgG1 Fc dimeric domain comprising an amino acid substitution as compared to human IgG1, wherein the variant that has increased in vitro binding to the human FcγRIIIa receptor as compared to human IgG1.

22. An antibody comprising:
a) an ABD that binds the extracellular domain of human NKp46; and
b) a variant IgG1 Fc dimeric domain comprising an amino acid substitution as compared to human IgG1, wherein the variant that has increased in vitro binding to the human FcγRIIIa receptor as compared to human IgG1.

23. An antibody comprising:
a) an ABD that binds the extracellular domain of human NKp30; and
b) a variant IgG1 Fc dimeric domain comprising an amino acid substitution as compared to human IgG1, wherein the variant that has increased in vitro binding to the human FcγRIIIa receptor as compared to human IgG1.
